(19) United States
(12) Patent Application Publication
(10) Pub. No.: US 2022/0348967 A1
(43) Pub. Date: Nov. 3, 2022

(54) Microorganisms With Improved Nitrogen Utilization For Ethanol Production

(71) Applicants: Novozymes A/S, Bagsvaerd (DK); Microbiogen Pty. Ltd., SYDNEY (AU)

(72) Inventors: Hamid Rismani Yazdi, Raleigh, NC (US); Sarah Schultheis Elliott, Wake Forest, NC (US); Paul Vincent Harris, Carnation, WA (US); Michael Glenn Catlett, West Sacramento, CA (US)

(73) Assignees: Novozymes A/S, Bagsvaerd (DK); Microbiogen Pty. Ltd., SYDNEY (AU)

(21) Appl. No.: 16/963,084

(22) PCT Filed: Jan. 29, 2019
(86) PCT No.: PCT/US2019/015682

§ 371 Date: Jul. 17, 2020

Related U.S. Application Data
(60) Provisional application No. 62/629,321, filed on Feb. 12, 2018.
(60) Provisional application No. 62/623,372, filed on Jan. 29, 2018.

(51) Int. Cl. C12P 7/06; C07K 14/39; C12N 15/52

(52) U.S. Cl. CPC C12P 7/06; C07K 14/39; C12N 15/52

(57) ABSTRACT

Described herein are fermention organisms, such as yeasts, comprising a genetic modification that increases or decreases expression of a transporter or regulator thereof, such as yeasts that express the FOT2 and FOTX transporters of SEQ ID NOs: 163 and 164. Also described are processes for producing a fermentation product, such as ethanol, from starch or cellulosic-containing material with the fermenting organisms.

### REFERENCE TO A SEQUENCE LISTING

[0001] This application contains a Sequence Listing in computer readable form, which is incorporated herein by reference.

### BACKGROUND

[0002] Production of ethanol from starch and cellulosic containing materials is well-known in the art.

[0003] The most commonly industrially used commercial process for starch-containing material, often referred to as a “conventional process”, includes liquefying gelatinized starch at high temperature (about 85° C.) using typically a bacterial alpha-amylase, followed by simultaneous saccharification and fermentation (SSF) carried out anaerobically in the presence of typically a glucoamylase and a Saccharomyces cerevisae yeast.

[0004] There are several processes in the art for saccharification of cellulose and hemicelluloses, and for fermentation of hydrolysates containing glucose, mannose, xylose and arabinose. Glucose and mannose are efficiently converted to ethanol during natural anaerobic metabolism. To obtain an economically relevant process at industrial scale, advances have been made to improve fermentation xylose within the hydrolysates.

[0005] Yeasts which are used for production of ethanol for use as fuel, such as in the corn ethanol industry, require several characteristics to ensure cost effective production of the ethanol. These characteristics include ethanol tolerance, low by-product yield, rapid fermentation, and the ability to limit the amount of residual sugars remaining in the ferment. Such characteristics have a marked effect on the viability of the industrial process.

[0006] Yeast of the genus Saccharomyces exhibits many of the characteristics required for production of ethanol. In particular, strains of Saccharomyces cerevisiae are widely used for the production of ethanol in the fuel ethanol industry. Strains of Saccharomyces cerevisiae that are widely used in the fuel ethanol industry have the ability to produce high yields of ethanol under fermentation conditions found in, for example, the fermentation of corn mash. An example of such a strain is the yeast used in commercially available ethanol yeast product called ETHANOL RED®.

[0007] The addition of exogenous protease to corn mash has been a strategic approach to increase availability amino nitrogen and accelerate rates of ethanol fermentation (See, e.g., Biomass 16 (1988) 2, pp. 77-87; U.S. Pat. No. 5,231,017; WO2003/066826; WO2007/145912; WO2010/008841; WO2014/037438; WO2015/078372). We also described expression of heterologous proteases in Saccharomyces cerevisiae for ethanol fermentation (WO2018/222990, the content of which is incorporated herein by reference).

[0008] Despite significant improvement of ethanol production processes over the past decade there is still a desire and need for providing improved processes of ethanol fermentation from starch and cellulosic containing material in an economically and commercially relevant scale.

### SUMMARY

[0009] Described herein are, inter alia, methods for producing a fermentation product, such as ethanol, from starch or cellulosic-containing material, and yeast suitable for use in such processes.

[0010] A first aspect relates to a yeast cells (e.g., recombinant yeast cells) comprising a genetic modification that increases or decreases expression of a transporter, or regulator thereof.

[0011] In one embodiment, the yeast cell is a Saccharomyces cerevisiae yeast cell comprising: (1) a heterologous polynucleotide encoding a transporter, and (2) a heterologous polynucleotide encoding a glucoamylase, alpha-amylase, or protease; wherein the transporter has at least 60%, e.g., at least 65%, 70%, 75%, 80%, 85%, 90%, 95%, 97%, 98%, 99%, or 100% sequence identity to the amino acid sequence of SEQ ID NO: 163 or SEQ ID NO: 164.

[0012] In one embodiment, the yeast cell comprises a heterologous polynucleotide encoding a transporter, wherein the transporter has at least 60%, e.g., at least 65%, 70%, 75%, 80%, 85%, 90%, 95%, 97%, 98%, 99%, or 100% sequence identity to the amino acid sequence of SEQ ID NO: 163 or SEQ ID NO: 164, and wherein the yeast cell comprises a recombinant genetic modification that increases expression of the transporter.

[0013] In one embodiment, the yeast cell comprises a heterologous polynucleotide encoding a transporter, wherein the transporter has at least 60%, e.g., at least 65%, 70%, 75%, 80%, 85%, 90%, 95%, 97%, 98%, 99%, or 100% sequence identity to the amino acid sequence of SEQ ID NO: 163 or SEQ ID NO: 164, and wherein the yeast further comprises a disruption to an endogenous transporter gene.

[0014] In one embodiment, the yeast cell is a Saccharomyces cerevisiae yeast cell comprising a heterologous polynucleotide encoding a transporter, wherein the transporter has at least 60%, e.g., at least 65%, 70%, 75%, 80%, 85%, 90%, 95%, 97%, 98%, 99%, or 100% sequence identity to the amino acid sequence of SEQ ID NO: 163 or SEQ ID NO: 164; and with the proviso that the yeast cell is other than: Saccharomyces cerevisiae MBG4851 (deposited under Accession No. V14/004037 at National Measurement Institute, Victoria, Australia) or a derivative thereof, Saccharomyces cerevisiae MBG4911 (deposited under Accession No. V15/001459 at National Measurement Institute, Victoria, Australia) or a derivative thereof, Saccharomyces cerevisiae MBG4913 (deposited under Accession No. V15/001460 at National Measurement Institute, Victoria, Australia) or a derivative thereof, Saccharomyces cerevisiae MBG4914 (deposited under Accession No. V15/001461 at National Measurement Institute, Victoria, Australia) or a derivative thereof, Saccharomyces cerevisiae MBG4930 (deposited under Accession No. V15/004035 at National Measurement Institute, Victoria, Australia) or a derivative thereof, Saccharomyces cerevisiae MBG4931 (deposited under Accession No. V15/004036 at National Measurement Institute, Victoria, Australia) or a derivative thereof, Saccharomyces cerevisiae MBG4932 (deposited under Accession No. V15/004037 at National Measurement Institute, Victoria, Australia) or a derivative thereof.

[0015] A second aspect relates to methods of producing a fermentation product from a starch-containing or cellulosic-containing material comprising: (a) saccharifying the starch-containing or cellulosic-containing material; and (b) fermenting the saccharified material of step (a) with the yeast cells of the first aspect.

[0016] In one embodiment, the method comprises liquefying the starch-containing material at a temperature above the initial gelatinization temperature in the presence of an alpha-amylase and a protease prior to saccharification. In one embodiment, the fermentation product is ethanol.

[0017] A third aspect relates to methods of producing a derivative of a yeast strain of the first aspect, comprising culturing a yeast strain of the first aspect with a second yeast strain under conditions which permit combining of DNA between the first and second yeast strains, and screening or selecting for a derivatived yeast strain comprising the heterologous polynucleotide encoding the trasnporter.

[0018] A fourth aspect relates to compositions comprising the yeast strain of the first aspect with one or more naturally occurring and/or non-naturally occurring components, such as components are selected from the group consisting of: surfactants, emulsifiers, gums, swelling agents, and antioxidants.

### BRIEF DESCRIPTION OF THE FIGURES

[0019] FIG. 1 shows improvement of tripeptide and tetrapeptide uptake by MBG4994 vs Ethanol Red® at 24 h during corn mash ethanol fermentation.

[0020] FIG. 2 shows final ethanol titer after 52 h fermentation of industrially prepared corn mash using the strains listed in Table 7.

[0021] FIG. 3 shows residual tripeptide after 29 h fermentation using industrially prepared corn mash with the strains listed in Table 7.

[0022] FIG. 4 shows residual tetrapeptide after 29 h fermentation using industrially prepared corn mash with the strains listed in Table 7.

[0023] FIG. 5 shows final ethanol titer after 53 h fermentation with industrially prepared mash using strains listed in Table 8.

[0024] FIG. 6 shows a plasmid map of pMBin369 described in Example 2.

[0025] FIG. 7 shows final ethanol titer after 68 h fermentation in corn mash with varied nitrogen concentration using Ethanol Red® (ER) and MBG4994.

### DEFINITIONS

[0026] Unless defined otherwise or clearly indicated by context, all technical and scientific terms used herein have the same meaning as commonly understood by one of ordinary skill in the art.

[0027] Allelic variant: The term “allelic variant” means any of two or more alternative forms of a gene occupying the same chromosomal locus. Allelic variation arises naturally through mutation, and may result in polymorphism within populations. Gene mutations can be silent (no change in the encoded polypeptide) or may encode polypeptides having altered amino acid sequences. An allelic variant of a polypeptide is a polypeptide encoded by an allelic variant of a gene.

[0028] Auxiliary Activity 9: The term “Auxiliary Activity 9” or “AA9” means a polypeptide classified as a lytic polysaccharide monooxygenase (Quinlan et al., 2011, Proc. Natl. Acad. Sci. USA 208: 15079-15084; Phillips et al., 2011, ACS Chem. Biol. 6: 1399-1406; Lin et al., 2012, Structure 20: 1051-1061). AA9 polypeptides were formerly classified into the glycoside hydrolase Family 61 (GH61) according to Henrissat, 1991, Biochem. J. 280: 309-316, and Henrissat and Bairoch, 1996, Biochem. J. 316: 695-696.

[0029] AA9 polypeptides enhance the hydrolysis of a cellulosic-containing material by an enzyme having cellulolytic activity. Cellulolytic enhancing activity can be determined by measuring the increase in reducing sugars or the increase of the total of cellobiose and glucose from the hydrolysis of a cellulosic-containing material by cellulolytic enzyme under the following conditions: 1-50 mg of total protein/g of cellulose in pretreated corn stover (PCS), wherein total protein is comprised of 50-99.5% w/w cellulolytic enzyme protein and 0.5-50% w/w protein of an AA9 polypeptide for 1-7 days at a suitable temperature, such as 40° C-80° C., e.g., 50° C., 55° C., 60° C., 65° C., or 70° C., and a suitable pH, such as 4-9, e.g., 4.5, 5.0, 5.5, 6.0, 6.5, 7.0, 7.5, 8.0, or 8.5, compared to a control hydrolysis with equal total protein loading without cellulolytic enhancing activity (1-50 mg of cellulolytic protein/g of cellulose in PCS).

[0030] AA9 polypeptide enhancing activity can be determined using a mixture of CELLUCLAST™ 1.5L (Novozymes A/S, Bagsværd, Denmark) and beta-glucosidase as the source of the cellulolytic activity, wherein the beta-glucosidase is present at a weight of at least 2-5% protein of the cellulase protein loading. In one embodiment, the beta-glucosidase is an Aspergillus oryzae beta-glucosidase (e.g., recombinantly produced in Aspergillus oryzae according to WO 02/095014). In another embodiment, the beta-glucosidase is an Aspergillus fumigatus beta-glucosidase (e.g., recombinantly produced in Aspergillus oryzae as described in WO 02/095014).

[0031] AA9 polypeptide enhancing activity can also be determined by incubating an AA9 polypeptide with 0.5% phosphoric acid swollen cellulose (PASC), 100 mM sodium acetate pH 5, 1 mM MnSO₄, 0.1% gallic acid, 0.025 mg/ml of Aspergillus fumigatus beta-glucosidase, and 0.01% TRITON® X-100 (4-(1,1,3,3-tetramethylbutyl)phenyl-polyethylene glycol) for 24-96 hours at 40° C. followed by determination of the glucose released from the PASC.

[0032] AA9 polypeptide enhancing activity can also be determined according to WO 2013/028928 for high temperature compositions.

[0033] AA9 polypeptides enhance the hydrolysis of a cellulosic-containing material catalyzed by enzyme having cellulolytic activity by reducing the amount of cellulolytic enzyme required to reach the same degree of hydrolysis preferably at least 1.01-fold, e.g., at least 1.05-fold, at least 1.10-fold, at least 1.25-fold, at least 1.5-fold, at least 2-fold, at least 3-fold, at least 4-fold, at least 5-fold, at least 10-fold, or at least 20-fold.

[0034] Beta-glucosidase: The term “beta-glucosidase” means a beta-D-glucoside glucohydrolase (E.C. 3.2.1.21) that catalyzes the hydrolysis of terminal non-reducing beta-D-glucose residues with the release of beta-D-glucose. Beta-glucosidase activity can be determined using p-nitrophenyl-beta-D-glucopyranoside as substrate according to the procedure of Venturi et al., 2002, J. Basic Microbiol. 42: 55-66. One unit of beta-glucosidase is defined as 1.0 μmole of p-nitrophenolate anion produced per minute at 25° C., pH 4.8 from 1 mM p-nitrophenyl-beta-D-glucopyranoside as substrate in 50 mM sodium citrate containing 0.01% TWEEN® 20.

[0035] Beta-xylosidase: The term “beta-xylosidase” means a beta-D-xyloside xylohydrolase (E.C. 3.2.1.37) that catalyzes the exo-hydrolysis of short beta (1→4)-xylooligosaccharides to remove successive D-xylose residues from non-reducing termini. Beta-xylosidase activity can be determined using 1 mM p-nitrophenyl-beta-D-xyloside as substrate in 100 mM sodium citrate containing 0.01% TWEEN® 20 at pH 5, 40° C. One unit of beta-xylosidase is defined as 1.0 μmole of p-nitrophenolate anion produced per minute at 40° C., pH 5 from 1 mM p-nitrophenyl-beta-D-xyloside in 100 mM sodium citrate containing 0.01% TWEEN® 20.

[0036] Catalase: The term “catalase” means a hydrogen-peroxide:hydrogen-peroxide oxidoreductase (EC 1.11.1.6) that catalyzes the conversion of 2 H₂O₂ to O₂+2 H₂O. For purposes of the present invention, catalase activity is determined according to U.S. Pat. No. 5,646,025. One unit of catalase activity equals the amount of enzyme that catalyzes the oxidation of 1 μmole of hydrogen peroxide under the assay conditions.

[0037] Catalytic domain: The term “catalytic domain” means the region of an enzyme containing the catalytic machinery of the enzyme.

[0038] Cellobiohydrolase: The term “cellobiohydrolase” means a 1,4-beta-D-glucan cellobiohydrolase (E.C. 3.2.1.91 and E.C. 3.2.1.176) that catalyzes the hydrolysis of 1,4-beta-D-glucosidic linkages in cellulose, cellooligosaccharides, or any beta-1,4-linked glucose containing polymer, releasing cellobiose from the reducing end (cellobiohydrolase I) or non-reducing end (cellobiohydrolase II) of the chain (Teeri, 1997, Trends in Biotechnology 15: 160-167; Teeri et al., 1998, Biochem. Soc. Trans. 26: 173-178). Cellobiohydrolase activity can be determined according to the procedures described by Lever et al., 1972, Anal. Biochem. 47: 273-279; van Tilbeurgh et al., 1982, FEBS Letters 149: 152-156; van Tilbeurgh and Claeyssens, 1985, FEBS Letters 187: 283-288; and Tomme et al., 1988, Eur. J. Biochem. 170: 575-581.

[0039] Cellulolytic enzyme or cellulase: The term “cellulolytic enzyme” or “cellulase” means one or more (e.g., two, several) enzymes that hydrolyze a cellulosic-containing material. Such enzymes include endoglucanase(s), cellobiohydrolase(s), beta-glucosidase(s), or combinations thereof. The two basic approaches for measuring cellulolytic enzyme activity include: (1) measuring the total cellulolytic enzyme activity, and (2) measuring the individual cellulolytic enzyme activities (endoglucanases, cellobiohydrolases, and beta-glucosidases) as reviewed in Zhang et al., 2006, Biotechnology Advances 24: 452-481. Total cellulolytic enzyme activity can be measured using insoluble substrates, including Whatman No 1 filter paper, microcrystalline cellulose, bacterial cellulose, algal cellulose, cotton, pretreated lignocellulose, etc. The most common total cellulolytic activity assay is the filter paper assay using Whatman No 1 filter paper as the substrate. The assay was established by the International Union of Pure and Applied Chemistry (IUPAC) (Ghose, 1987, Pure Appl. Chem. 59: 257-68).

[0040] Cellulolytic enzyme activity can be determined by measuring the increase in production/release of sugars during hydrolysis of a cellulosic-containing material by cellulolytic enzyme(s) under the following conditions: 1-50 mg of cellulolytic enzyme protein/g of cellulose in pretreated corn stover (PCS) (or other pretreated cellulosic-containing material) for 3-7 days at a suitable temperature such as 40° C.-80° C., e.g., 50° C., 55° C., 60° C., 65° C., or 70° C., and a suitable pH such as 4-9, e.g., 5.0, 5.5, 6.0, 6.5, or 7.0, compared to a control hydrolysis without addition of cellulolytic enzyme protein. Typical conditions are 1 ml reactions, washed or unwashed PCS, 5% insoluble solids (dry weight), 50 mM sodium acetate pH 5, 1 mM MnSO₄, 50° C., 55° C., or 60° C., 72 hours, sugar analysis by AMINEX® HPX-87H column chromatography (Bio-Rad Laboratories, Inc., Hercules, Calif., USA).

[0041] Coding sequence: The term “coding sequence” or “coding region” means a polynucleotide sequence, which specifies the amino acid sequence of a polypeptide. The boundaries of the coding sequence are generally determined by an open reading frame, which usually begins with the ATG start codon or alternative start codons such as GTG and TTG and ends with a stop codon such as TAA, TAG, and TGA. The coding sequence may be a sequence of genomic DNA, cDNA, a synthetic polynucleotide, and/or a recombinant polynucleotide.

[0042] Control sequence: The term “control sequence” means a nucleic acid sequence necessary for polypeptide expression. Control sequences may be native or foreign to the polynucleotide encoding the polypeptide, and native or foreign to each other. Such control sequences include, but are not limited to, a leader sequence, polyadenylation sequence, propeptide sequence, promoter sequence, signal peptide sequence, and transcription terminator sequence. The control sequences may be provided with linkers for the purpose of introducing specific restriction sites facilitating ligation of the control sequences with the coding region of the polynucleotide encoding a polypeptide.

[0043] Disruption: The term “disruption” means that a coding region and/or control sequence of a referenced gene is partially or entirely modified (such as by deletion, insertion, and/or substitution of one or more nucleotides) resulting in the absence (inactivation) or decrease in expression, and/or the absence or decrease of enzyme activity of the encoded polypeptide. The effects of disruption can be measured using techniques known in the art such as detecting the absence or decrease of enzyme activity using from cell-free extract measurements referenced herein; or by the absence or decrease of corresponding mRNA (e.g., at least 25% decrease, at least 50% decrease, at least 60% decrease, at least 70% decrease, at least 80% decrease, or at least 90% decrease); the absence or decrease in the amount of corresponding polypeptide having enzyme activity (e.g., at least 25% decrease, at least 50% decrease, at least 60% decrease, at least 70% decrease, at least 80% decrease, or at least 90% decrease); or the absence or decrease of the specific activity of the corresponding polypeptide having enzyme activity (e.g., at least 25% decrease, at least 50% decrease, at least 60% decrease, at least 70% decrease, at least 80% decrease, or at least 90% decrease). Disruptions of a particular gene of interest can be generated by methods known in the art, e.g., by directed homologous recombination (see Methods in Yeast Genetics (1997 edition), Adams, Gottschling, Kaiser, and Stems, Cold Spring Harbor Press (1998)).

[0044] Endogenous gene: The term “endogenous gene” means a gene that is native to the referenced host cell. “Endogenous gene expression” means expression of an endogenous gene.

[0045] Endoglucanase: The term “endoglucanase” means a 4-(1,3;1,4)-beta-D-glucan 4-glucanohydrolase (E.C. 3.2.1.4) that catalyzes endohydrolysis of 1,4-beta-D-glycosidic linkages in cellulose, cellulose derivatives (such as carboxymethyl cellulose and hydroxyethyl cellulose), lichenin, beta-1,4 bonds in mixed beta-1,3-1,4 glucans such as cereal beta-D-glucans or xyloglucans, and other plant material containing cellulosic components. Endoglucanase activity can be determined by measuring reduction in substrate viscosity or increase in reducing ends determined by a reducing sugar assay (Zhang et al., 2006, Biotechnology Advances 24: 452-481). Endoglucanase activity can also be determined using carboxymethyl cellulose (CMC) as substrate according to the procedure of Ghose, 1987, Pure and Appl. Chem. 59: 257-268, at pH 5, 40° C.

[0046] Expression: The term “expression” includes any step involved in the production of the polypeptide including, but not limited to, transcription, post-transcriptional modification, translation, post-translational modification, and secretion. Expression can be measured—for example, to detect increased expression—by techniques known in the art, such as measuring levels of mRNA and/or translated polypeptide.

[0047] Expression vector: The term “expression vector” means a linear or circular DNA molecule that comprises a polynucleotide encoding a polypeptide and is operably linked to control sequences that provide for its expression.

[0048] Fermentable medium: The term “fermentable medium” or “fermentation medium” refers to a medium comprising one or more (e.g., two, several) sugars, such as glucose, fructose, sucrose, cellobiose, xylose, xylulose, arabinose, mannose, galactose, and/or soluble oligosaccharides, wherein the medium is capable, in part, of being converted (fermented) by a host cell into a desired product, such as ethanol. In some instances, the fermentation medium is derived from a natural source, such as sugar cane, starch, or cellulose, and may be the result of pretreating the source by enzymatic hydrolysis (saccharification). The term fermentation medium is understood herein to refer to a medium before the fermenting organism is added, such as, a medium resulting from a saccharification process, as well as a medium used in a simultaneous saccharification and fermentation process (SSF).

[0049] Hemicellulolytic enzyme or hemicellulase: The term “hemicellulolytic enzyme” or “hemicellulase” means one or more (e.g., two, several) enzymes that hydrolyze a hemicellulosic material. See, for example, Shallom and Shoham, 2003, Current Opinion In Microbiology 6(3): 219-228). Hemicellulases are key components in the degradation of plant biomass. Examples of hemicellulases include, but are not limited to, an acetylmannan esterase, an acetylxylan esterase, an arabinanase, an arabinofuranosidase, a coumaric acid esterase, a feruloyl esterase, a galactosidase, a glucuronidase, a glucuronoyl esterase, a mannanase, a mannosidase, a xylanase, and a xylosidase. The substrates for these enzymes, hemicelluloses, are a heterogeneous group of branched and linear polysaccharides that are bound via hydrogen bonds to the cellulose microfibrils in the plant cell wall, crosslinking them into a robust network. Hemicelluloses are also covalently attached to lignin, forming together with cellulose a highly complex structure. The variable structure and organization of hemicelluloses require the concerted action of many enzymes for its complete degradation. The catalytic modules of hemicellulases are either glycoside hydrolases (GHs) that hydrolyze glycosidic bonds, or carbohydrate esterases (CEs), which hydrolyze ester linkages of acetate or ferulic acid side groups. These catalytic modules, based on homology of their primary sequence, can be assigned into GH and CE families. Some families, with an overall similar fold, can be further grouped into clans, marked alphabetically (e.g., GH-A). A most informative and updated classification of these and other carbohydrate active enzymes is available in the Carbohydrate-Active Enzymes (CAZy) database. Hemicellulolytic enzyme activities can be measured according to Ghose and Bisaria, 1987, Pure & Appl. Chem. 59: 1739-1752, at a suitable temperature such as 40° C.-80° C., e.g., 50° C., 55° C., 60° C., 65° C., or 70° C., and a suitable pH such as 4-9, e.g., 5.0, 5.5, 6.0, 6.5, or 7.0.

[0050] Heterologous polynucleotide: The term “heterologous polynucleotide” is defined herein as a polynucleotide that is not native to the host cell; a native polynucleotide in which structural modifications have been made to the coding region; a native polynucleotide whose expression is quantitatively altered as a result of a manipulation of the DNA by recombinant DNA techniques, e.g., a different (foreign) promoter; or a native polynucleotide in a host cell having one or more extra copies of the polynucleotide to quantitatively alter expression. A “heterologous gene” is a gene comprising a heterologous polynucleotide.

[0051] High stringency conditions: The term “high stringency conditions” means for probes of at least 100 nucleotides in length, prehybridization and hybridization at 42° C. in 5×SSPE, 0.3% SDS, 200 micrograms/ml sheared and denatured salmon sperm DNA, and 50% formamide, following standard Southern blotting procedures for 12 to 24 hours. The carrier material is finally washed three times each for 15 minutes using 0.2×SSC, 0.2% SDS at 65° C.

[0052] Host cell: The term “host cell” means any cell type that is susceptible to transformation, transfection, transduction, and the like with a nucleic acid construct or expression vector comprising a polynucleotide described herein (e.g., a polynucleotide encoding a trasporter, or regulator thereof). The term “host cell” encompasses any progeny of a parent cell that is not identical to the parent cell due to mutations that occur during replication. The term “recombinant cell” is defined herein as a non-naturally occurring host cell comprising one or more (e.g., two, several) heterologous polynucleotides introduced using recombinant techniques.

[0053] Low stringency conditions: The term “low stringency conditions” means for probes of at least 100 nucleotides in length, prehybridization and hybridization at 42° C. in 5×SSPE, 0.3% SDS, 200 micrograms/ml sheared and denatured salmon sperm DNA, and 25% formamide, following standard Southern blotting procedures for 12 to 24 hours. The carrier material is finally washed three times each for 15 minutes using 0.2×SSC, 0.2% SDS at 50° C.

[0054] Mature polypeptide: The term “mature polypeptide” is defined herein as a polypeptide having biological activity that is in its final form following translation and any post-translational modifications, such as N-terminal processing, C-terminal truncation, glycosylation, phosphorylation, etc.

[0055] Medium stringency conditions: The term “medium stringency conditions” means for probes of at least 100 nucleotides in length, prehybridization and hybridization at 42° C. in 5×SSPE, 0.3% SDS, 200 micrograms/ml sheared and denatured salmon sperm DNA, and 35% formamide, following standard Southern blotting procedures for 12 to 24 hours. The carrier material is finally washed three times each for 15 minutes using 0.2×SSC, 0.2% SDS at 55° C.

[0056] Medium-high stringency conditions: The term “medium-high stringency conditions” means for probes of at least 100 nucleotides in length, prehybridization and hybridization at 42° C. in 5×SSPE, 0.3% SDS, 200 micrograms/ml sheared and denatured salmon sperm DNA, and 35% formamide, following standard Southern blotting procedures for 12 to 24 hours. The carrier material is finally washed three times each for 15 minutes using 0.2×SSC, 0.2% SDS at 60° C.

[0057] Nucleic acid construct: The term “nucleic acid construct” means a polynucleotide comprises one or more (e.g., two, several) control sequences. The polynucleotide may be single-stranded or double-stranded, and may be isolated from a naturally occurring gene, modified to contain segments of nucleic acids in a manner that would not otherwise exist in nature, or synthetic.

[0058] Operably linked: The term “operably linked” means a configuration in which a control sequence is placed at an appropriate position relative to the coding sequence of a polynucleotide such that the control sequence directs expression of the coding sequence.

[0059] Pretreated corn stover: The term “Pretreated Corn Stover” or “PCS” means a cellulosic-containing material derived from corn stover by treatment with heat and dilute sulfuric acid, alkaline pretreatment, neutral pretreatment, or any pretreatment known in the art.

[0060] Protease: The term “protease” is defined herein as an enzyme that hydrolyses peptide bonds. It includes any enzyme belonging to the EC 3.4 enzyme group (including each of the thirteen subclasses thereof). The EC number refers to Enzyme Nomenclature 1992 from NC-IUBMB, Academic Press, San Diego, California, including supplements 1-5 published in Eur. J. Biochem. 223: 1-5 (1994); Eur. J. Biochem. 232: 1-6 (1995); Eur. J. Biochem. 237: 1-5 (1996); Eur. J. Biochem. 250: 1-6 (1997); and Eur. J. Biochem. 264: 610-650 (1999); respectively. The term “subtilases” refer to a sub-group of serine protease according to Siezen et al., 1991, Protein Engng. 4: 719-737 and Siezen et al., 1997, Protein Science 6: 501-523. Serine proteases or serine peptidases is a subgroup of proteases characterised by having a serine in the active site, which forms a covalent adduct with the substrate. Further the subtilases (and the serine proteases) are characterised by having two active site amino acid residues apart from the serine, namely a histidine and an aspartic acid residue. The subtilases may be divided into 6 sub-divisions, i.e. the Subtilisin family, the Thermitase family, the Proteinase K family, the Lantibiotic peptidase family, the Kexin family and the Pyrolysin family. The term “protease activity” means a proteolytic activity (EC 3.4). Proteases may be endopeptidases (EC 3.4.21). Protease activity may be determined using methods described herein (See, Examples), known in the art (e.g., US 2015/0125925) or using commercially available assay kits (e.g., Sigma-Aldrich).

[0061] Sequence Identity: The relatedness between two amino acid sequences or between two nucleotide sequences is described by the parameter “sequence identity”.

[0062] For purposes described herein, the degree of sequence identity between two amino acid sequences is determined using the Needleman-Wunsch algorithm (Needleman and Wunsch, J. Mol. Biol. 1970, 48, 443-453) as implemented in the Needle program of the EMBOSS package (EMBOSS: The European Molecular Biology Open Software Suite, Rice et al., Trends Genet 2000, 16, 276-277), preferably version 3.0.0 or later. The optional parameters used are gap open penalty of 10, gap extension penalty of 0.5, and the EBLOSUM62 (EMBOSS version of BLOSUM62) substitution matrix. The output of Needle labeled “longest identity” (obtained using the -nobrief option) is used as the percent identity and is calculated as follows:

(Identical Residues×100)/(Length of the Referenced Sequence−Total Number of Gaps in Alignment)

[0063] For purposes described herein, the degree of sequence identity between two deoxyribonucleotide sequences is determined using the Needleman-Wunsch algorithm (Needleman and Wunsch, 1970, supra) as implemented in the Needle program of the EMBOSS package (EMBOSS: The European Molecular Biology Open Software Suite, Rice et al., 2000, supra), preferably version 3.0.0 or later. The optional parameters used are gap open penalty of 10, gap extension penalty of 0.5, and the EDNAFULL (EMBOSS version of NCBI NUC4.4) substitution matrix. The output of Needle labeled “longest identity” (obtained using the -nobrief option) is used as the percent identity and is calculated as follows:

(Identical Deoxyribonucleotides×100)/(Length of Referenced Sequence−Total Number of Gaps in Alignment)

[0064] Signal peptide: The term “signal peptide” is defined herein as a peptide linked (fused) in frame to the amino terminus of a polypeptide having biological activity and directs the polypeptide into the cell's secretory pathway.

[0065] Very high stringency conditions: The term “very high stringency conditions” means for probes of at least 100 nucleotides in length, prehybridization and hybridization at 42° C. in 5×SSPE, 0.3% SDS, 200 micrograms/ml sheared and denatured salmon sperm DNA, and 50% formamide, following standard Southern blotting procedures for 12 to 24 hours. The carrier material is finally washed three times each for 15 minutes using 0.2×SSC, 0.2% SDS at 70° C.

[0066] Very low stringency conditions: The term “very low stringency conditions” means for probes of at least 100 nucleotides in length, prehybridization and hybridization at 42° C. in 5×SSPE, 0.3% SDS, 200 micrograms/ml sheared and denatured salmon sperm DNA, and 25% formamide, following standard Southern blotting procedures for 12 to 24 hours. The carrier material is finally washed three times each for 15 minutes using 0.2×SSC, 0.2% SDS at 45° C.

[0067] Xylanase: The term “xylanase” means a 1,4-beta-D-xylan-xylohydrolase (E.C. 3.2.1.8) that catalyzes the endohydrolysis of 1,4-beta-D-xylosidic linkages in xylans. Xylanase activity can be determined with 0.2% AZCL-arabinoxylan as substrate in 0.01% TRITON® X-100 and 200 mM sodium phosphate pH 6 at 37° C. One unit of xylanase activity is defined as 1.0 μmole of azurine produced per minute at 37° C., pH 6 from 0.2% AZCL-arabinoxylan as substrate in 200 mM sodium phosphate pH 6.

[0068] Xylose Isomerase: The term “Xylose Isomerase” or “XI” means an enzyme which can catalyze D-xylose into D-xylulose in vivo, and convert D-glucose into D-fructose in vitro. Xylose isomerase is also known as “glucose isomerase” and is classified as E.C. 5.3.1.5.

[0069] Reference to “about” a value or parameter herein includes embodiments that are directed to that value or parameter per se. For example, description referring to “about X” includes the embodiment “X”. When used in combination with measured values, “about” includes a range that encompasses at least the uncertainty associated with the method of measuring the particular value, and can include a range of plus or minus two standard deviations around the stated value.

[0070] Likewise, reference to a gene or polypeptide that is “derived from” another gene or polypeptide X, includes the gene or polypeptide X.

[0071] As used herein and in the appended claims, the singular forms “a,” “or,” and “the” include plural referents unless the context clearly dictates otherwise.

[0072] It is understood that the embodiments described herein include “consisting” and/or “consisting essentially of” embodiments. As used herein, except where the context requires otherwise due to express language or necessary implication, the word “comprise” or variations such as “comprises” or “comprising” is used in an inclusive sense, i.e. to specify the presence of the stated features but not to preclude the presence or addition of further features in various embodiments.

### DETAILED DESCRIPTION

[0073] Described herein, inter alia, are methods for producing a fermentation product, such as ethanol, from starch or cellulosic containing material.

[0074] During industrial scale fermentation, yeast encounter various physiological challenges including variable concentrations of sugars, high concentrations of yeast metabolites such as ethanol, glycerol, organic acids, osmotic stress, as well as potential competition from contaminating microbes such as wild yeasts and bacteria. As a consequence, many yeasts are not suitable for use in industrial fermentation. The most widely used commercially available industrial strain of Saccharomyces (i.e. for industrial scale fermentation) is the Saccharomyces cerevisiae strain used, for example, in the product Ethanol Red®. This strain is well suited to industrial ethanol production; however, it requires significant amounts of added nitrogen, such urea and ammonia, to promote yeast growth.

[0075] The Applicant has developed yeast strains for ethanol fermentation that are capable of improved utilization of nitrogen, such as nitrogen from peptides (e.g., tripeptides/tetrapeptides) in the fermentation medium. Applicant's resulting yeast can be used in fermentation methods that provide fast rates and high yields without the dependence on large amounts of exogenously added protease and/or supplemental nitrogen source.

[0076] In one aspect is a method of producing a fermentation product from a starch-containing or cellulosic-containing material comprising:

(a) saccharifying the starch-containing or cellulosic-containing material; and
(b) fermenting the saccharified material of step (a) with a fermenting organism;

[0077] wherein the fermenting organism comprises a genetic modification that increases or decreases expression of transporter/permease or regulator thereof.

[0078] Steps a) and b) are carried out either sequentially or simultaneously (SSF). In one embodiment, steps a) and b) are carried out simultaneously (SSF). In another embodiment, steps a) and b) are carried out sequentially.

### Fermenting Organism

[0079] The fermenting organism described herein may be derived from any host cell known to the skilled artisan capable of producing a fermentation product, such as ethanol. As used herein, a “derivative” of strain is derived from a referenced strain, such as through mutagenesis, recombinant DNA technology, mating, cell fusion, or cytoduction between yeast strains. Those skilled in the art will understand that the genetic alterations, including metabolic modifications exemplified herein, may be described with reference to a suitable host organism and their corresponding metabolic reactions or a suitable source organism for desired genetic material such as genes for a desired metabolic pathway. However, given the complete genome sequencing of a wide variety of organisms and the high level of skill in the area of genomics, those skilled in the art can apply the teachings and guidance provided herein to other organisms. For example, the metabolic alterations exemplified herein can readily be applied to other species by incorporating the same or analogous encoding nucleic acid from species other than the referenced species.

[0080] The host cells for preparing the genetically modified cells described herein can be from any suitable host, such as a yeast strain, including, but not limited to, a Saccharomyces, Rhodotorula, Schizosaccharomyces, Kluyveromyces, Pichia, Hansenula, Issatchenkia, Rhodosporidium, Candida, Yarrowia, Lipomyces, Cryptococcus, or Dekkera sp. cell. In some embodiments, the yeast cell is a I. orientalis, C. lambica, S. bulderi or a S. cerevisiae cell. In particular, Saccharomyces host cells are contemplated, such as Saccharomyces cerevisiae, bayanus or carlsbergensis cells. In one embodiment, the yeast cell is a Saccharomyces cerevisiae cell.

[0081] Suitable cells can, for example, be derived from commercially available strains and polyploid or aneuploid industrial strains, including but not limited to those from Superstart™, THERMOSACC®, C5 FUEL™, XyloFerm®, etc. (Lallemand); RED STAR and ETHANOL RED® (Fermentis/Lesaffre, USA); FALI (AB Mauri); Baker's Best Yeast, Baker's Compressed Yeast, etc. (Fleishmann's Yeast); BIOFERM AFT, XP, CF, and XR (North American Bioproducts Corp.); Turbo Yeast (Gert Strand AB); and FERMIOL® (DSM Specialties). Other useful yeast strains are available from biological depositories such as the American Type Culture Collection (ATCC) or the Deutsche Sammlung von Mikroorganismen und Zellkulturen GmbH (DSMZ), such as, e.g., BY4741 (e.g., ATCC 201388); Y108-1 (ATCC PTA.10567) and NRRL YB-1952 (ARS Culture Collection). Still other S. cerevisiae strains suitable as host cells DBY746, [Alpha][Eta]22, S150-2B, GPY55-15Ba, CEN.PK, USM21, TMB3500, TMB3400, VTT-A-63015, VTT-A-85068, VTT-c-79093 and their derivatives as well as Saccharomyces sp. 1400, 424A (LNH-ST), 259A (LNH-ST) and derivatives thereof. In one embodiment, the recombinant cell is a derivative of a strain Saccharomyces cerevisiae CIBTS1260 (deposited under Accession No. NRRL Y-50973 at the Agricultural Research Service Culture Collection (NRRL), Illinois 61604 U.S.A.).

[0082] The genetic modifications may be introduced using methods known in the art and described herein, such as recombinant techniques, as well as non-recombinant breeding techniques (e.g., methods described and concerned in U.S. Pat. No. 8,257,959).

[0083] The strain may also be a derivative of Saccharomyces cerevisiae strain NMI V14/004037 (See, WO2015/143324 and WO2015/143317 each incorporated herein by reference), strain nos. V15/004035, V15/004036, and V15/004037 (See, WO 2016/153924 incorporated herein by reference), strain nos. V15/001459, V15/001460, V15/001461 (See, WO2016/138437 incorporated herein by reference) or any strain described in WO2017/087330 (incorporated herein by reference).

[0084] The fermenting organisms according to the invention have been generated in order to improve fermentation yield and to improve process economy by cutting enzyme costs since part or all of the necessary enzymes needed to improve method performance are be produced by the fermenting organism.

[0085] The fermenting organisms described herein may utilize expression vectors comprising the coding sequence of one or more (e.g., two, several) heterologous genes linked to one or more control sequences that direct expression in a suitable cell under conditions compatible with the control sequence(s). Such expression vectors may be used in any of the cells and methods described herein. The polynucleotides described herein may be manipulated in a variety of ways to provide for expression of a desired polypeptide. Manipulation of the polynucleotide prior to its insertion into a vector may be desirable or necessary depending on the expression vector. The techniques for modifying polynucleotides utilizing recombinant DNA methods are well known in the art.

[0086] A construct or vector (or multiple constructs or vectors) comprising the one or more (e.g., two, several) heterologous genes may be introduced into a cell so that the construct or vector is maintained as a chromosomal integrant or as a self-replicating extra-chromosomal vector as described earlier.

[0087] The various nucleotide and control sequences may be joined together to produce a recombinant expression vector that may include one or more (e.g., two, several) convenient restriction sites to allow for insertion or substitution of the polynucleotide at such sites. Alternatively, the polynucleotide(s) may be expressed by inserting the polynucleotide(s) or a nucleic acid construct comprising the sequence into an appropriate vector for expression. In creating the expression vector, the coding sequence is located in the vector so that the coding sequence is operably linked with the appropriate control sequences for expression.

[0088] The recombinant expression vector may be any vector (e.g., a plasmid or virus) that can be conveniently subjected to recombinant DNA procedures and can bring about expression of the polynucleotide. The choice of the vector will typically depend on the compatibility of the vector with the host cell into which the vector is to be introduced. The vector may be a linear or closed circular plasmid.

[0089] The vector may be an autonomously replicating vector, i.e., a vector that exists as an extrachromosomal entity, the replication of which is independent of chromosomal replication, e.g., a plasmid, an extrachromosomal element, a minichromosome, or an artificial chromosome. The vector may contain any means for assuring self-replication. Alternatively, the vector may be one that, when introduced into the host cell, is integrated into the genome and replicated together with the chromosome(s) into which it has been integrated. Furthermore, a single vector or plasmid or two or more vectors or plasmids that together contain the total DNA to be introduced into the genome of the cell, or a transposon, may be used.

[0090] The expression vector may contain any suitable promoter sequence that is recognized by a cell for expression of a gene described herein. The promoter sequence contains transcriptional control sequences that mediate the expression of the polypeptide. The promoter may be any polynucleotide that shows transcriptional activity in the cell of choice including mutant, truncated, and hybrid promoters, and may be obtained from genes encoding extracellular or intracellular polypeptides either homologous or heterologous to the cell.

[0091] Each heterologous polynucleotide described herein may be operably linked to a promoter that is foreign to the polynucleotide. For example, in one embodiment, the heterologous polynucleotide encoding the transporter is operably linked to a promoter foreign to the polynucleotide. The promoters may be identical to or share a high degree of sequence identity (e.g., at least about 80%, at least about 85%, at least about 90%, at least about 95%, or at least about 99%) with a selected native promoter.

[0092] Examples of suitable promoters for directing the transcription of the nucleic acid constructs in a yeast cells, include, but are not limited to, the promoters obtained from the genes for enolase, (e.g., S. cerevisiae enolase or I. orientalis enolase (ENO1)), galactokinase (e.g., S. cerevisiae galactokinase or I. orientalis galactokinase (GAL1)), alcohol dehydrogenase/glyceraldehyde-3-phosphate dehydrogenase (e.g., S. cerevisiae alcohol dehydrogenase/glyceraldehyde-3-phosphate dehydrogenase or I. orientalis alcohol dehydrogenase/glyceraldehyde-3-phosphate dehydrogenase (ADH1, ADH2/GAP)), triose phosphate isomerase (e.g., S. cerevisiae triose phosphate isomerase or I. orientalis triose phosphate isomerase (TPI)), metallothionein (e.g., S. cerevisiae metallothionein or I. orientalis metallothionein (CUP1)), 3-phosphoglycerate kinase (e.g., S. cerevisiae 3-phosphoglycerate kinase or I. orientalis 3-phosphoglycerate kinase (PGK)), PDC1, xylose reductase (XR), xylitol dehydrogenase (XDH), L-(+)-lactate-cytochrome c oxidoreductase (CYB2), translation elongation factor-1 (TEF1), translation elongation factor-2 (TEF2), glyceraldehyde-3-phosphate dehydrogenase (GAPDH), and orotidine 5′-phosphate decarboxylase (URA3) genes. Other useful promoters for yeast host cells are described by Romanos et al., 1992, Yeast 8: 423-488.

[0093] The control sequence may also be a suitable transcription terminator sequence, which is recognized by a host cell to terminate transcription. The terminator sequence is operably linked to the 3′-terminus of the polynucleotide encoding the polypeptide. Any terminator that is functional in the yeast cell of choice may be used. The terminator may be identical to or share a high degree of sequence identity (e.g., at least about 80%, at least about 85%, at least about 90%, at least about 95%, or at least about 99%) with the selected native terminator.

[0094] Suitable terminators for yeast host cells may be obtained from the genes for enolase (e.g., S. cerevisiae or I. orientalis enolase cytochrome C (e.g., S. cerevisiae or I. orientalis cytochrome (CYC1)), glyceraldehyde-3-phosphate dehydrogenase (e.g., S. cerevisiae or I. orientalis glyceraldehyde-3-phosphate dehydrogenase (gpd)), PDC1, XR, XDH, transaldolase (TAL), transketolase (TKL), ribose 5-phosphate ketol-isomerase (RKI), CYB2, and the galactose family of genes (especially the GAL10 terminator). Other useful terminators for yeast host cells are described by Romanos et al., 1992, supra.

[0095] The control sequence may also be an mRNA stabilizer region downstream of a promoter and upstream of the coding sequence of a gene which increases expression of the gene.

[0096] Examples of suitable mRNA stabilizer regions are obtained from a Bacillus thuringiensis crylllA gene (WO 94/25612) and a Bacillus subtilis SP82 gene (Hue et al., 1995, Journal of Bacteriology 177: 3465-3471).

[0097] The control sequence may also be a suitable leader sequence, when transcribed is a nontranslated region of an mRNA that is important for translation by the host cell. The leader sequence is operably linked to the 5′-terminus of the polynucleotide encoding the polypeptide. Any leader sequence that is functional in the yeast cell of choice may be used.

[0098] Suitable leaders for yeast host cells are obtained from the genes for enolase (e.g., S. cerevisiae or I. orientalis enolase (ENO-1)), 3-phosphoglycerate kinase (e.g., S. cerevisiae or I. orientalis 3-phosphoglycerate kinase), alpha-factor (e.g., S. cerevisiae or I. orientalis alpha-factor), and alcohol dehydrogenase/glyceraldehyde-3-phosphate dehydrogenase (e.g., S. cerevisiae or I. orientalis alcohol dehydrogenase/glyceraldehyde-3-phosphate dehydrogenase (ADH2/GAP)).

[0099] The control sequence may also be a polyadenylation sequence; a sequence operably linked to the 3′-terminus of the polynucleotide and, when transcribed, is recognized by the host cell as a signal to add polyadenosine residues to transcribed mRNA. Any polyadenylation sequence that is functional in the host cell of choice may be used. Useful polyadenylation sequences for yeast cells are described by Guo and Sherman, 1995, Mol. Cellular Biol. 15: 5983-5990.

[0100] It may also be desirable to add regulatory sequences that allow the regulation of the expression of the polypeptide relative to the growth of the host cell. Examples of regulatory systems are those that cause the expression of the gene to be turned on or off in response to a chemical or physical stimulus, including the presence of a regulatory compound. Regulatory systems in prokaryotic systems include the lac, tac, and trp operator systems. In yeast, the ADH2 system or GAL1 system may be used.

[0101] The vectors may contain one or more (e.g., two, several) selectable markers that permit easy selection of transformed, transfected, transduced, or the like cells. A selectable marker is a gene the product of which provides for biocide or viral resistance, resistance to heavy metals, prototrophy to auxotrophs, and the like. Suitable markers for yeast host cells include, but are not limited to, ADE2, HIS3, LEU2, LYS2, MET3, TRP1, and URA3.

[0102] The vectors may contain one or more (e.g., two, several) elements that permit integration of the vector into the host cell's genome or autonomous replication of the vector in the cell independent of the genome.

[0103] For integration into the host cell genome, the vector may rely on the polynucleotide's sequence encoding the polypeptide or any other element of the vector for integration into the genome by homologous or non-homologous recombination. Alternatively, the vector may contain additional polynucleotides for directing integration by homologous recombination into the genome of the host cell at a precise location(s) in the chromosome(s). To increase the likelihood of integration at a precise location, the integrational elements should contain a sufficient number of nucleic acids, such as 100 to 10,000 base pairs, 400 to 10,000 base pairs, and 800 to 10,000 base pairs, which have a high degree of sequence identity to the corresponding target sequence to enhance the probability of homologous recombination. The integrational elements may be any sequence that is homologous with the target sequence in the genome of the host cell. Furthermore, the integrational elements may be non-encoding or encoding polynucleotides. On the other hand, the vector may be integrated into the genome of the host cell by non-homologous recombination. Potential integration loci include those described in the art (e.g., See US2012/0135481).

[0104] For autonomous replication, the vector may further comprise an origin of replication enabling the vector to replicate autonomously in the yeast cell. The origin of replication may be any plasmid replicator mediating autonomous replication that functions in a cell. The term “origin of replication” or “plasmid replicator” means a polynucleotide that enables a plasmid or vector to replicate in vivo. Examples of origins of replication for use in a yeast host cell are the 2 micron origin of replication, ARS1, ARS4, the combination of ARS1 and CEN3, and the combination of ARS4 and CEN6.

[0105] More than one copy of a polynucleotide described herein may be inserted into a host cell to increase production of a polypeptide. An increase in the copy number of the polynucleotide can be obtained by integrating at least one additional copy of the sequence into the yeast cell genome or by including an amplifiable selectable marker gene with the polynucleotide where cells containing amplified copies of the selectable marker gene, and thereby additional copies of the polynucleotide, can be selected for by cultivating the cells in the presence of the appropriate selectable agent.

[0106] The procedures used to ligate the elements described above to construct the recombinant expression vectors described herein are well known to one skilled in the art (See, e.g., Sambrook et al., 1989, supra).

[0107] Additional procedures and techniques known in the art for the preparation of recombinant cells for ethanol fermentation, are described in, e.g., WO2016/045569, the content of which is hereby incorporated by reference.

[0108] The fermenting organism may be in the form of a composition comprising a fermenting organism (e.g., a yeast strain described herein) and a naturally occurring and/or a non-naturally occurring component.

[0109] The fermenting organism described herein may be in any viable form, including crumbled, dry, including active dry and instant, compressed, cream (liquid) form etc. In one embodiment, the fermenting organism (e.g., a Saccharomyces cerevisiae yeast strain) is dry yeast, such as active dry yeast or instant yeast. In one embodiment, the fermenting organism (e.g., a Saccharomyces cerevisiae yeast strain) is crumbled yeast. In one embodiment, the fermenting organism (e.g., a Saccharomyces cerevisiae yeast strain) is compressed yeast. In one embodiment, the fermenting organism (e.g., a Saccharomyces cerevisiae yeast strain) is cream yeast.

[0110] In one embodiment is a composition comprising a fermenting organism described herein (e.g., a Saccharomyces cerevisiae yeast strain), and one or more of the component selected from the group consisting of: surfactants, emulsifiers, gums, swelling agent, and antioxidants and other processing aids.

[0111] The compositions described herein may comprise a fermenting organism described herein (e.g., a Saccharomyces cerevisiae yeast strain) and any suitable surfactants. In one embodiment, the surfactant(s) is/are an anionic surfactant, cationic surfactant, and/or nonionic surfactant.

[0112] The compositions described herein may comprise a fermenting organism described herein (e.g., a Saccharomyces cerevisiae yeast strain) and any suitable emulsifier. In one embodiment, the emulsifier is a fatty-acid ester of sorbitan. In one embodiment, the emulsifier is selected from the group of sorbitan monostearate (SMS), citric acid esters of monodiglycerides, polyglycerolester, fatty acid esters of propylene glycol.

[0113] In one embodiment, the composition comprises a fermenting organism described herein (e.g., a Saccharomyces cerevisiae yeast strain), and Olindronal SMS, Olindronal SK, or Olindronal SPL including composition concerned in European Patent No. 1,724,336 (hereby incorporated by reference). These products are commercially available from Bussetti, Austria, for active dry yeast.

[0114] The compositions described herein may comprise a fermenting organism described herein (e.g., a Saccharomyces cerevisiae yeast strain) and any suitable gum. In one embodiment, the gum is selected from the group of carob, guar, tragacanth, arabic, xanthan and acacia gum, in particular for cream, compressed and dry yeast.

[0115] The compositions described herein may comprise a fermenting organism described herein (e.g., a Saccharomyces cerevisiae yeast strain) and any suitable swelling agent. In one embodiment, the swelling agent is methyl cellulose or carboxymethyl cellulose.

[0116] The compositions described herein may comprise a fermenting organism described herein (e.g., a Saccharomyces cerevisiae yeast strain) and any suitable anti-oxidant. In one embodiment, the antioxidant is butylated hydroxyanisol (BHA) and/or butylated hydroxytoluene (BHT), or ascorbic acid (vitamin C), particular for active dry yeast.

### Transporters/Permeases

[0117] In some embodiments, the fermenting organism (e.g., recombinant yeast cell) comprises a genetic modification that increases or decreases expression of a transporter/permease. The transporter may be any transporter that is suitable for improved nitrogen utilization of the fermenting organisms, such as a naturally occurring transporter (e.g., a native transporter from another species or an endogenous transporter expressed from a modified expression vector) or a variant thereof that retains transporter activity.

[0118] The transporters/permeases include, e.g., amino acid transporters, peptide transporters (such as any polypeptide capable of transporting dipeptides, tripeptides, and/or oligopeptides (n>3)), mitochondrial transporters, vacuole transporters, and ammonium permeases.

[0119] Transporter/permease activity can be measured using any suitable assay known in the art.

[0120] In some embodiments, the genetic modification is a heterologous polynucleotide encoding a transporter/permease.

[0121] In some embodiments, the fermenting organism has an increased level of transporter activity compared to the fermenting organism without the genetic modification, when cultivated under the same conditions. In some embodiments, the fermenting organism has an increased level of transporter activity of at least 5%, e.g., at least 10%, at least 15%, at least 20%, at least 25%, at least 50%, at least 100%, at least 150%, at least 200%, at least 300%, or at 500% compared to the fermenting organism without the genetic modification, when cultivated under the same conditions.

[0122] In some embodiments, the fermenting organism has increased or decreased expression of a transporter when compared to Saccharomyces cerevisiae strain Ethanol Red® (deposited under Accession No. V14/007039 at National Measurement Institute, Victoria, Australia) under the same conditions. In some embodiments, the fermenting organism has an increased expression of at least 5%, e.g., at least 10%, at least 15%, at least 20%, at least 25%, at least 50%, at least 100%, at least 150%, at least 200%, at least 300%, or at 500% compared to Saccharomyces cerevisiae strain Ethanol Red® (deposited under Accession No. V14/007039 at National Measurement Institute, Victoria, Australia) under the same conditions (e.g., under conditions described herein, such as on or after 53 hours fermentation).

[0123] Exemplary transporters that may be expressed with the fermenting organisms and methods of use described herein include, but are not limited to, transporters shown in Table 1 (or derivatives thereof).

TABLE 1

| | | | | Transporter |
|---|---|---|---|---|
| Gene Name | Description | Gene reference | Coding SEQ ID NO. | SEQ ID NO. |
| AGP1 | Amino Acid Permease | DAA07460.1 | 1 | 86 |
| BAP2 | Amino Acid Permease | CAA85012.1 | 2 | 87 |
| BAP3 | Amino Acid Permease | CAA52970.1 | 3 | 88 |
| GNP1 | Amino Acid Permease | AAB48002.1 | 4 | 89 |
| TAT1 | Amino Acid Permease | AAA50552.1 | 5 | 90 |
| TAT2 | Amino Acid Permease | CAA55777.1 | 6 | 91 |
| GAP1 | Amino Acid Permease | CAA36858.1 | 7 | 92 |
| HIP1 | Amino Acid Permease | AAA34673.1 | 8 | 93 |
| MMP1 | Amino Acid Permease | CAA97514.1 | 9 | 94 |
| SAM3 | Amino Acid Permease | CAA98010.1 | 10 | 95 |
| CAN1 | Amino Acid Permease | CAA27416.1 | 11 | 96 |
| ALP1 | Amino Acid Permease | CAA52199.1 | 12 | 97 |
| LYP1 | Amino Acid Permease | CAA47729.1 | 13 | 98 |
| PUT4 | Amino Acid Permease | AAA34925.1 | 14 | 99 |
| DIP5 | Amino Acid Permease | CAA65074.1 | 15 | 100 |
| SSY1 | Amino Acid Permease | CAA90380.1 | 16 | 101 |
| AGP2 | Amino Acid Permease | CAA53491.1 | 17 | 102 |
| AGP3 | Amino Acid Permease | BAA09186.1 | 18 | 103 |
| MUP1 | Amino Acid Permease | AAB63529.1 | 19 | 104 |
| MUP3 | Amino Acid Permease | AAB65048.1 | 20 | 105 |
| UGA4 | Amino Acid Permease | CAA47101.1 | 21 | 106 |
| TPO5 | Amino Acid Permease | CAA81512.1 | 22 | 107 |
| HNM1 | Amino Acid Permease | AAA34537.1 | 23 | 108 |
| BIO5 | Amino Acid Permease | AAB50012.1 | 24 | 109 |
| MEP1 | Ammonium Permease | CAA54699.1 | 25 | 110 |
| MEP2 | Ammonium Permease | CAA58587.1 | 26 | 111 |
| MEP3 | Ammonium Permease | AAB68278.1 | 27 | 112 |
| DAL5 | Other Transporters/Permease | AAA34555.1 | 28 | 113 |
| YCT1 | Other Transporters/Permease | CAA88002.1 | 29 | 114 |
| TNA1 | Other Transporters/Permease | CAA69082.1 | 30 | 115 |
| VHT1 | Other Transporters/Permease | CAA97067.1 | 31 | 116 |
| FEN2 | Other Transporters/Permease | CAA42320.1 | 32 | 117 |
| SEO1 | Other Transporters/Permease | AAC04968.1 | 33 | 118 |
| FUR4 | Other Transporters/Permease | CAA53678.1 | 34 | 119 |
| DAL4 | Other Transporters/Permease | CAA78826.1 | 35 | 120 |
| FUI1 | Other Transporters/Permease | CAA55059.1 | 36 | 121 |
| THI7 | Other Transporters/Permease | AAB67405.1 | 37 | 122 |
| THI72 | Other Transporters/Permease | CAA99401.1 | 38 | 123 |
| NRT1 | Other Transporters/Permease | CAA94556.1 | 39 | 124 |
| FCY2 | Other Transporters/Permease | CAA36040.1 | 40 | 125 |
| TPN1 | Other Transporters/Permease | CAA62788.1 | 41 | 126 |
| DUR3 | Other Transporters/Permease | AAA34582.1 | 42 | 127 |
| PTR2 | Other Transporters/Permease | AAC37368.1 | 43 | 128 |
| OPT1 | Other Transporters/Permease | CAA83999.1 | 44 | 129 |
| OPT2 | Other Transporters/Permease | AAB64623.1 | 45 | 130 |
| ATO3 | Other Transporters/Permease | AAB64820.1 | 46 | 131 |
| AQR1 | Other Transporters/Permease | AAA99646.1 | 47 | 132 |
| TPO1 | Other Transporters/Permease | CAA97477.1 | 48 | 133 |
| AGC1 | Mitochondrial Transporter | CAA95017.1 | 49 | 134 |
| ODC1 | Mitochondrial Transporter | AAB68225.1 | 50 | 135 |
| ODC2 | Mitochondrial Transporter | CAA63185.1 | 51 | 136 |
| ORT1 | Mitochondrial Transporter | CAA60862.1 | 52 | 137 |
| CTP1 | Mitochondrial Transporter | AAC48984.1 | 53 | 138 |
| OAC1 | Mitochondrial Transporter | AAA34886.1 | 54 | 139 |
| AVT5 | Mitochondrial Transporter | CAA56013.1 | 55 | 140 |
| LEU5 | Mitochondrial Transporter | AAB68424.1 | 56 | 141 |
| YMC1 | Mitochondrial Transporter | CAA47602.1 | 57 | 142 |
| YMC2 | Mitochondrial Transporter | CAA55607.1 | 58 | 143 |
| PET8 | Mitochondrial Transporter | AAA64802.1 | 59 | 144 |
| AVT1 | Vacuole Transporter | CAA60922.1 | 60 | 145 |
| AVT2 | Vacuole Transporter | AAB65023.1 | 61 | 146 |
| AVT3 | Vacuole Transporter | CAA81508.1 | 62 | 147 |
| AVT4 | Vacuole Transporter | CAA90525.1 | 63 | 148 |
| AVT5 | Vacuole Transporter | CAA56013.1 | 64 | 149 |
| AVT6 | Vacuole Transporter | AAC03217.1 | 65 | 150 |
| AVT7 | Vacuole Transporter | CAA86706.1 | 66 | 151 |
| VBA1 | Vacuole Transporter | CAA89235.1 | 67 | 152 |
| VBA2 | Vacuole Transporter | CAA85258.1 | 68 | 153 |
| VBA3 | Vacuole Transporter | CAA42398.1 | 69 | 154 |
| VBA4 | Vacuole Transporter | CAA88672.1 | 70 | 155 |
| VBA5 | Vacuole Transporter | CAA82185.1 | 71 | 156 |
| ATG22 | Vacuole Transporter | CAA42378.1 | 72 | 157 |
| CAN1 | Vacuole Transporter | CAA27416.1 | 73 | 158 |
| LYP1 | Vacuole Transporter | CAA47729.1 | 74 | 159 |
| RTC2 | Vacuole Transporter | CAA85105.1 | 75 | 160 |
| YGL114w | Other Transporters/Permease | CAA96822.1 | 76 | 161 |
| DUR3 | Urea and polyamine | AAA34582.1 | 77 | 162 |
| | transporter | | | |
| FOT2 | Other Transporters/Permease | CEP25277.1 | 78 | 163 |
| FOTX | Other Transporters/Permease | CEP25276.1 | 79 | 164 |
| OPT3 | Other Transporters/Permease | ABD17823.1 | 80 | 165 |
| OPT4 | Other Transporters/Permease | AOW30993.1 | 81 | 166 |
| OPT5 | Other Transporters/Permease | AOW27826.1 | 82 | 167 |
| OPT6 | Other Transporters/Permease | ABD17829.1 | 83 | 168 |
| OPT7 | Other Transporters/Permease | ABD17830.1 | 84 | 169 |
| OPT8 | Other Transporters/Permease | AOW30319.1 | 85 | 170 |

[0124] Additional polynucleotides encoding suitable transporters may be derived from microorganisms of any suitable genus, including those readily available within the UniProtKB database (www.uniprot.org).

[0125] The transporter may be a bacterial transporter. For example, the transporter may be derived from a Gram-positive bacterium such as a Bacillus, Clostridium, Enterococcus, Geobacillus, Lactobacillus, Lactococcus, Oceanobacillus, Staphylococcus, Streptococcus, or Streptomyces, or a Gram-negative bacterium such as a Campylobacter, E. coli, Flavobacterium, Fusobacterium, Helicobacter, Ilyobacter, Neisseria, Pseudomonas, Salmonella, or Ureaplasma.

[0126] In one embodiment, the transporter is derived from Bacillus alkalophilus, Bacillus amyloliquefaciens, Bacillus brevis, Bacillus circulans, Bacillus clausii, Bacillus coagulans, Bacillus firmus, Bacillus lautus, Bacillus lentus, Bacillus licheniformis, Bacillus megaterium, Bacillus pumilus, Bacillus stearothermophilus, Bacillus subtilis, or Bacillus thuringiensis.

[0127] In another embodiment, the transporter is derived from Streptococcus equisimilis, Streptococcus pyogenes, Streptococcus uberis, or Streptococcus equi subsp. Zooepidemicus.

[0128] In another embodiment, the transporter is derived from Streptomyces achromogenes, Streptomyces avermitilis, Streptomyces coelicolor, Streptomyces griseus, or Streptomyces lividans.

[0129] The transporter may be a fungal transporter. For example, the transporter may be derived from a yeast such as a Candida, Kluyveromyces, Pichia, Saccharomyces, Schizosaccharomyces, Yarrowia or Issatchenkia; or derived from a filamentous fungus such as an Acremonium, Agaricus, Alternaria, Aspergillus, Aureobasidium, Botryospaeria, Ceriporiopsis, Chaetomidium, Chrysosporium, Claviceps, Cochliobolus, Coprinopsis, Coptotermes, Corynascus, Cryphonectria, Cryptococcus, Diplodia, Exidia, Filibasidium, Fusarium, Gibberella, Holomastigotoides, Humicola, lrpex, Lentinula, Leptospaeria, Magnaporthe, Melanocarpus, Meripilus, Mucor, Myceliophthora, Neocallimastix, Neurospora, Paecilomyces, Penicillium, Phanerochaete, Piromyces, Poitrasia, Pseudoplectania, Pseudotrichonympha, Rhizomucor, Schizophyllum, Scytalidium, Talaromyces, Thermoascus, Thielavia, Tolypocladium, Trichoderma, Trichophaea, Verticillium, Volvariella, or Xylaria.

[0130] In another embodiment, the transporter is derived from Saccharomyces carlsbergensis, Saccharomyces cerevisiae, Saccharomyces diastaticus, Saccharomyces douglasii, Saccharomyces kluyveri, Saccharomyces norbensis, or Saccharomyces oviformis.

[0131] In one embodiment, the transporter is derived from Torulaspora, such as the Torulaspora microellipsoides transporters of SEQ ID NO: 163 or SEQ ID NO: 164.

[0132] In another embodiment, the transporter is derived from Acremonium cellulolyticus, Aspergillus aculeatus, Aspergillus awamori, Aspergillus foetidus, Aspergillus fumigatus, Aspergillus japonicus, Aspergillus nidulans, Aspergillus niger, Aspergillus oryzae, Chrysosporium inops, Chrysosporium keratinophilum, Chrysosporium lucknowense, Chrysosporium merdarium, Chrysosporium pannicola, Chrysosporium queenslandicum, Chrysosporium tropicum, Chrysosporium zonatum, Fusarium bactridioides, Fusarium cerealis, Fusarium crookwellense, Fusarium culmorum, Fusarium graminearum, Fusarium graminum, Fusarium heterosporum, Fusarium negundi, Fusarium oxysporum, Fusarium reticulatum, Fusarium roseum, Fusarium sambucinum, Fusarium sarcochroum, Fusarium sporotrichioides, Fusarium sulphureum, Fusarium torulosum, Fusarium trichothecioides, Fusarium venenatum, Humicola grisea, Humicola insolens, Humicola lanuginosa, Irpex lacteus, Mucor miehei, Myceliophthora thermophila, Neurospora crassa, Penicillium funiculosum, Penicillium purpurogenum, Phanerochaete chrysosporium, Thielavia achromatica, Thielavia albomyces, Thielavia albopilosa, Thielavia australeinsis, Thielavia fimeti, Thielavia microspora, Thielavia ovispora, Thielavia peruviana, Thielavia setosa, Thielavia spededonium, Thielavia subthermophila, Thielavia terrestris, Trichoderma harzianum, Trichoderma koningii, Trichoderma longibrachiatum, Trichoderma reesei, or Trichoderma viride.

[0133] It will be understood that for the aforementioned species, the invention encompasses both the perfect and imperfect states, and other taxonomic equivalents, e.g., anamorphs, regardless of the species name by which they are known. Those skilled in the art will readily recognize the identity of appropriate equivalents.

[0134] Strains of these species are readily accessible to the public in a number of culture collections, such as the American Type Culture Collection (ATCC), Deutsche Sammlung von Mikroorganismen and Zellkulturen GmbH (DSMZ), Centraalbureau Voor Schimmelcultures (CBS), and Agricultural Research Service Patent Culture Collection, Northern Regional Research Center (NRRL).

[0135] The transporter coding sequences described or referenced herein, or a subsequence thereof, as well as the transporter described or referenced herein, or a fragment thereof, may be used to design nucleic acid probes to identify and clone DNA encoding a transporter from strains of different genera or species according to methods well known in the art. In particular, such probes can be used for hybridization with the genomic DNA or cDNA of a cell of interest, following standard Southern blotting procedures, in order to identify and isolate the corresponding gene therein. Such probes can be considerably shorter than the entire sequence, but should be at least 15, e.g., at least 25, at least 35, or at least 70 nucleotides in length. Preferably, the nucleic acid probe is at least 100 nucleotides in length, e.g., at least 200 nucleotides, at least 300 nucleotides, at least 400 nucleotides, at least 500 nucleotides, at least 600 nucleotides, at least 700 nucleotides, at least 800 nucleotides, or at least 900 nucleotides in length. Both DNA and RNA probes can be used. The probes are typically labeled for detecting the corresponding gene (for example, with ³²P, ³H, ³⁵S, biotin, or avidin).

[0136] A genomic DNA or cDNA library prepared from such other strains may be screened for DNA that hybridizes with the probes described above and encodes a parent. Genomic or other DNA from such other strains may be separated by agarose or polyacrylamide gel electrophoresis, or other separation techniques. DNA from the libraries or the separated DNA may be transferred to and immobilized on nitrocellulose or other suitable carrier material. In order to identify a clone or DNA that hybridizes with a coding sequence, or a subsequence thereof, the carrier material is used in a Southern blot.

[0137] In one embodiment, the nucleic acid probe is a polynucleotide, or subsequence thereof, that encodes the transporter of any one of SEQ ID NOs: 86-170, or a fragment thereof.

[0138] For purposes of the probes described above, hybridization indicates that the polynucleotide hybridizes to a labeled nucleic acid probe, or the full-length complementary strand thereof, or a subsequence of the foregoing; under very low to very high stringency conditions. Molecules to which the nucleic acid probe hybridizes under these conditions can be detected using, for example, X-ray film. Stringency and washing conditions are defined as described supra.

[0139] In one embodiment, the transporter is encoded by a polynucleotide that hybridizes under at least low stringency conditions, e.g., medium stringency conditions, medium-high stringency conditions, high stringency conditions, or very high stringency conditions with the full-length complementary strand of the coding sequence for any one of the transporters described or referenced herein (e.g., SEQ ID NOs: 1-85). (Sambrook et al., 1989, Molecular Cloning, A Laboratory Manual, 2d edition, Cold Spring Harbor, New York).

[0140] The transporter may also be identified and obtained from other sources including microorganisms isolated from nature (e.g., soil, composts, water, silage, etc.) or DNA samples obtained directly from natural materials (e.g., soil, composts, water, silage, etc.) using the above-mentioned probes. Techniques for isolating microorganisms and DNA directly from natural habitats are well known in the art. The polynucleotide encoding a transporter may then be derived by similarly screening a genomic or cDNA library of another microorganism or mixed DNA sample.

[0141] Once a polynucleotide encoding a transporter has been detected with a suitable probe as described herein, the sequence may be isolated or cloned by utilizing techniques that are known to those of ordinary skill in the art (See, e.g., Sambrook et al., 1989, supra). Techniques used to isolate or clone polynucleotides encoding transporters include isolation from genomic DNA, preparation from cDNA, or a combination thereof. The cloning of the polynucleotides from such genomic DNA can be effected, e.g., by using the well-known polymerase chain reaction (PCR) or antibody screening of expression libraries to detect cloned DNA fragments with shares structural features (See, e.g., Innis et al., 1990, PCR: A Guide to Methods and Application, Academic Press, New York). Other nucleic acid amplification procedures such as ligase chain reaction (LCR), ligated activated transcription (LAT) and nucleotide sequence-based amplification (NASBA) may be used.

[0142] In one embodiment, the transporter comprises or consists of the amino acid sequence of any one of SEQ ID NOs: 86-170 (such as SEQ ID NO: 129, SEQ ID NO: 163 or SEQ ID NO: 164). In another embodiment, the transporter is a fragment of the transporter of any one of SEQ ID NOs: 86-170, such as SEQ ID NO: 129, SEQ ID NO: 163 or SEQ ID NO: 164 (e.g., wherein the fragment has transporter activity). In one embodiment, the number of amino acid residues in the fragment is at least 75%, e.g., at least 80%, 85%, 90%, or 95% of the number of amino acid residues in referenced full length transporter (e.g. any one of SEQ ID NOs: 86-170; such as SEQ ID NO: 129, SEQ ID NO: 163 or SEQ ID NO: 164). In other embodiments, the transporter may comprise the catalytic domain of any transporter described or referenced herein (e.g., the catalytic domain of any one of SEQ ID NOs: 86-170; such as SEQ ID NO: 129, SEQ ID NO: 163 or SEQ ID NO: 164).

[0143] The transporter may be a variant of any one of the transporter described supra (e.g., any one of SEQ ID NOs: 86-170; such as SEQ ID NO: 129, SEQ ID NO: 163 or SEQ ID NO: 164). In one embodiment, the transporter has at least 60%, e.g., at least 65%, 70%, 75%, 80%, 85%, 90%, 95%, 97%, 98%, 99%, or 100% sequence identity to any one of the transporters described supra (e.g., any one of SEQ ID NOs: 86-170; such as SEQ ID NO: 129, SEQ ID NO: 163 or SEQ ID NO: 164).

[0144] In one embodiment, the transporter sequence differs by no more than ten amino acids, e.g., by no more than five amino acids, by no more than four amino acids, by no more than three amino acids, by no more than two amino acids, or by one amino acid from the amino acid sequence of any one of the transportera described supra (e.g., any one of SEQ ID NOs: 86-170; such as SEQ ID NO: 129, SEQ ID NO: 163 or SEQ ID NO: 164). In one embodiment, the transporter has an amino acid substitution, deletion, and/or insertion of one or more (e.g., two, several) of amino acid sequence of any one of the transporters described supra (e.g., any one of SEQ ID NOs: 86-170; such as SEQ ID NO: 129, SEQ ID NO: 163 or SEQ ID NO: 164). In some embodiments, the total number of amino acid substitutions, deletions and/or insertions is not more than 10, e.g., not more than 9, 8, 7, 6, 5, 4, 3, 2, or 1.

[0145] The amino acid changes are generally of a minor nature, that is conservative amino acid substitutions or insertions that do not significantly affect the folding and/or activity of the protein; small deletions, typically of one to about 30 amino acids; small amino-terminal or carboxyl-terminal extensions, such as an amino-terminal methionine residue; a small linker peptide of up to about 20-25 residues; or a small extension that facilitates purification by changing net charge or another function, such as a poly-histidine tract, an antigenic epitope or a binding domain.

[0146] Examples of conservative substitutions are within the group of basic amino acids (arginine, lysine and histidine), acidic amino acids (glutamic acid and aspartic acid), polar amino acids (glutamine and asparagine), hydrophobic amino acids (leucine, isoleucine and valine), aromatic amino acids (phenylalanine, tryptophan and tyrosine), and small amino acids (glycine, alanine, serine, threonine and methionine). Amino acid substitutions that do not generally alter specific activity are known in the art and are described, for example, by H. Neurath and R.L. Hill, 1979, In, The Proteins, Academic Press, New York. The most commonly occurring exchanges are Ala/Ser, Val/Ile, Asp/Glu, Thr/Ser, Ala/Gly, Ala/Thr, Ser/Asn, Ala/Val, Ser/Gly, Tyr/Phe, Ala/Pro, Lys/Arg, Asp/Asn, Leu/Ile, Leu/Val, Ala/Glu, and Asp/Gly.

[0147] Alternatively, the amino acid changes are of such a nature that the physico-chemical properties of the polypeptides are altered. For example, amino acid changes may improve the thermal stability of the transporters, alter the substrate specificity, change the pH optimum, and the like.

[0148] Essential amino acids can be identified according to procedures known in the art, such as site-directed mutagenesis or alanine-scanning mutagenesis (Cunningham and Wells, 1989, Science 244: 1081-1085). In the latter technique, single alanine mutations are introduced at every residue in the molecule, and the resultant mutant molecules are tested for activity to identify amino acid residues that are critical to the activity of the molecule. See also, Hilton et al., 1996, J. Biol. Chem. 271: 4699-4708. The active site or other biological interaction can also be determined by physical analysis of structure, as determined by such techniques as nuclear magnetic resonance, crystallography, electron diffraction, or photoaffinity labeling, in conjunction with mutation of putative contact site amino acids (See, for example, de Vos et al., 1992, Science 255: 306-312; Smith et al., 1992, J. Mol. Biol. 224: 899-904; Wlodaver et al., 1992, FEBS Lett. 309: 59-64). The identities of essential amino acids can also be inferred from analysis of identities with other transporters that are related to the referenced transporter.

[0149] Additional guidance on the structure-activity relationship of the transporters herein can be determined using multiple sequence alignment (MSA) techniques well-known in the art. Based on the teachings herein, the skilled artisan could make similar alignments with any number of transporters described herein or known in the art. Such alignments aid the skilled artisan to determine potentially relevant domains (e.g., binding domains or catalytic domains), as well as which amino acid residues are conserved and not conserved among the different transporter sequences. It is appreciated in the art that changing an amino acid that is conserved at a particular position between disclosed polypeptides will more likely result in a change in biological activity (Bowie et al., 1990, Science 247: 1306-1310: “Residues that are directly involved in protein functions such as binding or catalysis will certainly be among the most conserved”). In contrast, substituting an amino acid that is not highly conserved among the polypeptides will not likely or significantly alter the biological activity.

[0150] Even further guidance on the structure-activity relationship for the skilled artisan can be found in published x-ray crystallography studies known in the art.

[0151] Single or multiple amino acid substitutions, deletions, and/or insertions can be made and tested using known methods of mutagenesis, recombination, and/or shuffling, followed by a relevant screening procedure, such as those disclosed by Reidhaar-Olson and Sauer, 1988, Science 241: 53-57; Bowie and Sauer, 1989, Proc. Natl. Acad. Sci. USA 86: 2152-2156; WO 95/17413; or WO 95/22625. Other methods that can be used include error-prone PCR, phage display (e.g., Lowman et al., 1991, Biochemistry 30: 10832-10837; U.S. Pat. No. 5,223,409; WO 92/06204), and region-directed mutagenesis (Derbyshire et al., 1986, Gene 46: 145; Ner et al., 1988, DNA 7: 127).

[0152] Mutagenesis/shuffling methods can be combined with high-throughput, automated screening methods to detect activity of cloned, mutagenized polypeptides expressed by host cells (Ness et al., 1999, Nature Biotechnology 17: 893-896). Mutagenized DNA molecules that encode active transporters can be recovered from the host cells and rapidly sequenced using standard methods in the art. These methods allow the rapid determination of the importance of individual amino acid residues in a polypeptide.

[0153] In another embodiment, the heterologous polynucleotide encoding the transporter comprises a coding sequence having at least 60%, e.g., at least 65%, at least 70%, at least 75%, at least 80%, at least 85%, at least 90%, at least 95%, at least 96%, at least 97%, at least 98%, at least 99%, or 100% sequence identity to the coding sequence of any one of the transporters described supra (e.g., any one of SEQ ID NOs: 1-85; such as SEQ ID NO: 44, SEQ ID NO: 78 or SEQ ID NO: 79).

[0154] In one embodiment, the heterologous polynucleotide encoding the transporter comprises or consists of the coding sequence of any one of the transporters described supra (e.g., any one of SEQ ID NOs: 1-85; such as SEQ ID NO: 44, SEQ ID NO: 78 or SEQ ID NO: 79). In another embodiment, the heterologous polynucleotide encoding the transporter comprises a subsequence of the coding sequence of any one of the transporters described supra (e.g., any one of SEQ ID NOs: 1-85; such as SEQ ID NO: 44, SEQ ID NO: 78 or SEQ ID NO: 79) wherein the subsequence encodes a polypeptide having transporter activity. In another embodiment, the number of nucleotides residues in the coding subsequence is at least 75%, e.g., at least 80%, 85%, 90%, or 95% of the number of the referenced coding sequence.

[0155] The referenced coding sequence of any related aspect or embodiment described herein can be the native coding sequence or a degenerate sequence, such as a codon-optimized coding sequence designed for use in a particular host cell (e.g., optimized for expression in Saccharomyces cerevisiae).

[0156] The transporter may be a fused polypeptide or cleavable fusion polypeptide in which another polypeptide is fused at the N-terminus or the C-terminus of the transporter. A fused polypeptide may be produced by fusing a polynucleotide encoding another polypeptide to a polynucleotide encoding the transporter. Techniques for producing fusion polypeptides are known in the art, and include ligating the coding sequences encoding the polypeptides so that they are in frame and that expression of the fused polypeptide is under control of the same promoter(s) and terminator. Fusion proteins may also be constructed using intein technology in which fusions are created post-translationally (Cooper et al., 1993, EMBO J. 12: 2575-2583; Dawson et al., 1994, Science 266: 776-779).

[0157] In some embodiments, the fermenting organism (e.g., recombinant yeast cell) comprises a disruption to an endogenous transporter gene (e.g., any one of the transporter genes shown in Table 1, such as any one of SEQ ID NOs: 1-85). In some embodiments, the disrupted endogenous transporter gene is inactivated. In another embodiment, the coding sequence of the endogenous gene has at least 60%, e.g., at least 65%, at least 70%, at least 75%, at least 80%, at least 85%, at least 90%, at least 95%, at least 96%, at least 97%, at least 98%, at least 99%, or 100% sequence identity to the coding sequence of any one of the transporters described supra (e.g., any one of SEQ ID NOs: 1-85). In another embodiment, the endogenous gene encodes a transporter having at least 60%, e.g., at least 65%, at least 70%, at least 75%, at least 80%, at least 85%, at least 90%, at least 95%, at least 96%, at least 97%, at least 98%, at least 99%, or 100% sequence identity to the any one of the transporters described supra (e.g., any one of SEQ ID NOs: 86-170).

[0158] The fermenting organisms comprising a gene disruption may be constructed using methods well known in the art, including those methods described herein. A portion of the gene can be disrupted such as the coding region or a control sequence required for expression of the coding region. Such a control sequence of the gene may be a promoter sequence or a functional part thereof, i.e., a part that is sufficient for affecting expression of the gene. For example, a promoter sequence may be inactivated resulting in no expression or a weaker promoter may be substituted for the native promoter sequence to reduce expression of the coding sequence. Other control sequences for possible modification include, but are not limited to, a leader, propeptide sequence, signal sequence, transcription terminator, and transcriptional activator.

[0159] The fermenting organisms comprising a gene disruption may be constructed by gene deletion techniques to eliminate or reduce expression of the gene. Gene deletion techniques enable the partial or complete removal of the gene thereby eliminating their expression. In such methods, deletion of the gene is accomplished by homologous recombination using a plasmid that has been constructed to contiguously contain the 5′ and 3′ regions flanking the gene.

[0160] The fermenting organisms comprising a gene disruption may also be constructed by introducing, substituting, and/or removing one or more (e.g., two, several) nucleotides in the gene or a control sequence thereof required for the transcription or translation thereof. For example, nucleotides may be inserted or removed for the introduction of a stop codon, the removal of the start codon, or a frame-shift of the open reading frame. Such a modification may be accomplished by site-directed mutagenesis or PCR generated mutagenesis in accordance with methods known in the art. See, for example, Botstein and Shortle, 1985, Science 229: 4719; Lo et al., 1985, Proc. Natl. Acad. Sci. U.S.A. 81: 2285; Higuchi et al., 1988, Nucleic Acids Res 16: 7351; Shimada, 1996, Meth. Mol. Biol. 57: 157; Ho et al., 1989, Gene 77: 61; Horton et al., 1989, Gene 77: 61; and Sarkar and Sommer, 1990, BioTechniques 8: 404.

[0161] The fermenting organisms comprising a gene disruption may also be constructed by inserting into the gene a disruptive nucleic acid construct comprising a nucleic acid fragment homologous to the gene that will create a duplication of the region of homology and incorporate construct DNA between the duplicated regions. Such a gene disruption can eliminate gene expression if the inserted construct separates the promoter of the gene from the coding region or interrupts the coding sequence such that a non-functional gene product results. A disrupting construct may be simply a selectable marker gene accompanied by 5′ and 3′ regions homologous to the gene. The selectable marker enables identification of transformants containing the disrupted gene.

[0162] The fermenting organisms comprising a gene disruption may also be constructed by the process of gene conversion (see, for example, Iglesias and Trautner, 1983, Molecular General Genetics 189: 73-76). For example, in the gene conversion method, a nucleotide sequence corresponding to the gene is mutagenized in vitro to produce a defective nucleotide sequence, which is then transformed into the recombinant strain to produce a defective gene. By homologous recombination, the defective nucleotide sequence replaces the endogenous gene. It may be desirable that the defective nucleotide sequence also comprises a marker for selection of transformants containing the defective gene.

[0163] The fermenting organisms comprising a gene disruption may be further constructed by random or specific mutagenesis using methods well known in the art, including, but not limited to, chemical mutagenesis (See, e.g., Hopwood, The Isolation of Mutants in Methods in Microbiology (J.R. Norris and D.W. Ribbons, eds.) pp. 363-433, Academic Press, New York, 1970). Modification of the gene may be performed by subjecting the parent strain to mutagenesis and screening for mutant strains in which expression of the gene has been reduced or inactivated. The mutagenesis, which may be specific or random, may be performed, for example, by use of a suitable physical or chemical mutagenizing agent, use of a suitable oligonucleotide, or subjecting the DNA sequence to PCR generated mutagenesis. Furthermore, the mutagenesis may be performed by use of any combination of these mutagenizing methods.

[0164] Examples of a physical or chemical mutagenizing agent suitable for the present purpose include ultraviolet (UV) irradiation, hydroxylamine, N-methyl-N′-nitro-N-nitrosoguanidine (MNNG), N-methyl-N′-nitrosogaunidine (NTG) O-methyl hydroxylamine, nitrous acid, ethyl methane sulphonate (EMS), sodium bisulphite, formic acid, and nucleotide analogues. When such agents are used, the mutagenesis is typically performed by incubating the parent strain to be mutagenized in the presence of the mutagenizing agent of choice under suitable conditions, and selecting for mutants exhibiting reduced or no expression of the gene.

[0165] A nucleotide sequence homologous or complementary to a gene described herein may be used from other microbial sources to disrupt the corresponding gene in a recombinant strain of choice.

[0166] In one embodiment, the modification of a gene in the recombinant cell is unmarked with a selectable marker. Removal of the selectable marker gene may be accomplished by culturing the mutants on a counter-selection medium. Where the selectable marker gene contains repeats flanking its 5′ and 3′ ends, the repeats will facilitate the looping out of the selectable marker gene by homologous recombination when the mutant strain is submitted to counter-selection. The selectable marker gene may also be removed by homologous recombination by introducing into the mutant strain a nucleic acid fragment comprising 5′ and 3′ regions of the defective gene, but lacking the selectable marker gene, followed by selecting on the counter-selection medium. By homologous recombination, the defective gene containing the selectable marker gene is replaced with the nucleic acid fragment lacking the selectable marker gene. Other methods known in the art may also be used.

### Regulators

[0167] In some embodiments, the fermenting organism (e.g., recombinant yeast cell) comprises a genetic modification that increases or decreases expression of a regulator, such as as tranporter regulator. Regulators may be any regulator that is suitable for improved nitrogen utilization of the fermenting organisms, such as a naturally occurring regulator (e.g., a native regulator from another species or an endogenous regulator expressed from a modified expression vector) or a variant thereof.

[0168] In some embodiments, the genetic modification is a heterologous polynucleotide encoding a regulator.

[0169] In some embodiments, the fermenting organism has increased or decreased expression of a regulator when compared to Saccharomyces cerevisiae strain Ethanol Red® (deposited under Accession No. V14/007039 at National Measurement Institute, Victoria, Australia) under the same conditions. In some embodiments, the fermenting organism has an increased expression of at least 5%, e.g., at least 10%, at least 15%, at least 20%, at least 25%, at least 50%, at least 100%, at least 150%, at least 200%, at least 300%, or at 500% compared to Saccharomyces cerevisiae strain Ethanol Red® (deposited under Accession No. V14/007039 at National Measurement Institute, Victoria, Australia) under the same conditions.

[0170] Exemplary regulators of regulators that may be expressed with the fermenting organisms and methods of use described herein include, but are not limited to, regulators shown in Table 2 below (or derivatives thereof).

TABLE 2
Regulators

| Gene | Gene | Coding | Regulator |
|---|---|---|---|
| Name | Reference | SEQ ID No. | SEQ ID No. |
| ABF1 | | 171 | 231 |
| ACE2 | | 172 | 232 |
| BUR6 | | 173 | 233 |
| CSE2 | | 174 | 234 |
| GAL11 | | 175 | 235 |
| GCN5 | | 176 | 236 |
| GCR1 | | 177 | 237 |
| HI R3 | | 178 | 238 |
| HSF1 | | 179 | 239 |
| IXR1 | | 180 | 240 |
| MED2 | | 181 | 241 |
| MET32 | | 182 | 242 |
| MET4 | | 183 | 243 |
| MSS11 | | 184 | 244 |
| OAF1 | | 185 | 245 |
| RPN4 | | 186 | 246 |
| RTG3 | | 187 | 247 |
| SFL1 | | 188 | 248 |
| SFP1 | | 189 | 249 |
| SK01 | | 190 | 250 |
| SPT20 | | 191 | 251 |
| SPT3 | | 192 | 252 |
| SPT7 | | 193 | 253 |
| SRB2 | | 194 | 254 |
| SRB8 | | 195 | 255 |
| SSN2 | | 196 | 256 |
| STP1 | | 197 | 257 |
| SWI4 | | 198 | 258 |
| TYE7 | | 199 | 259 |
| UGA3 | | 200 | 260 |
| UME6 | | 201 | 261 |
| YOX1 | | 202 | 262 |
| CDC28 | | 203 | 263 |
| YAPS | | 204 | 264 |
| YAP6 | | 205 | 265 |
| CST6 | | 206 | 266 |
| FHL1 | | 207 | 267 |
| GCN4 | AAA34640.1 | 208 | 268 |
| LEU3 | | 209 | 269 |
| MET31 | | 210 | 270 |
| SPN1 | | 211 | 271 |
| SPT6 | | 212 | 272 |
| TFC7 | | 213 | 273 |
| TUP1 | | 214 | 274 |
| VVTM1 | | 215 | 275 |
| YAP1 | | 216 | 276 |
| YAP6 | | 217 | 277 |
| CAD1 | | 218 | 278 |
| XBP1 | | 219 | 279 |
| GLN3 | | 220 | 280 |
| RGR1 | | 221 | 281 |
| IXR1 | | 222 | 282 |
| RTC1 | CAA64732.1 | 223 | 283 |
| GAT1 | AAB03516.1 | 224 | 284 |
| CUP9 | AAA66189.1 | 225 | 285 |
| NPR2 | DAA07592.1 | 226 | 286 |
| DAL81 | AAA35192.1 | 227 | 287 |
| DAL82 | CAA38391.1 | 228 | 288 |
| PTR1 | CAA37779.1 | 229 | 289 |
| PTR3 | BAA09268.1 | 230 | 290 |

[0171] Additional polynucleotides encoding suitable regulators may be derived from microorganisms of any suitable genus, including those readily available within the UniProtKB database (www.uniprot.org).

[0172] The regulator may be a regulator from any bacterial or fungal species, as described supra.

[0173] The regulator coding sequences described or referenced herein, or a subsequence thereof, as well as the regulators described or referenced herein, or a fragment thereof, may be used to design nucleic acid probes to identify and clone DNA encoding a regulators from strains of different genera or species as described supra. In one embodiment, the nucleic acid probe is a polynucleotide, or subsequence thereof, that encodes the regulator of any one of SEQ ID NOs: 231-290, or a fragment thereof.

[0174] In one embodiment, the regulator is encoded by a polynucleotide that hybridizes under at least low stringency conditions, e.g., medium stringency conditions, medium-high stringency conditions, high stringency conditions, or very high stringency conditions with the full-length complementary strand of the coding sequence for any one of the regulator described or referenced herein (e.g., SEQ ID NOs: 171-230). (Sambrook et al., 1989, Molecular Cloning, A Laboratory Manual, 2d edition, Cold Spring Harbor, New York).

[0175] The regulator may also be identified and obtained from other sources including microorganisms isolated from nature (e.g., soil, composts, water, silage, etc.) or DNA samples obtained directly from natural materials (e.g., soil, composts, water, silage, etc.) as described supra.

[0176] Once a polynucleotide encoding a regulator has been detected with a suitable probe as described herein, the sequence may be isolated or cloned by utilizing techniques that are known to those of ordinary skill in the art, as described supra.

[0177] In one embodiment, the regulator is a polypeptide that regulates any one of the transporters of Table 1.

[0178] In one embodiment, the regulator comprises or consists of the amino acid sequence of any one of SEQ ID NOs: 231-290. In another embodiment, the transporter is a fragment of the regulator of any one of SEQ ID NOs: 231-290. In one embodiment, the number of amino acid residues in the fragment is at least 75%, e.g., at least 80%, 85%, 90%, or 95% of the number of amino acid residues in referenced full-length regulator (e.g., any one of SEQ ID NOs: 231-290).

[0179] The regulator may be a variant of any one of the regulators described supra (e.g., any one of SEQ ID NOs: 231-290). In one embodiment, the regulator has at least 60%, e.g., at least 65%, 70%, 75%, 80%, 85%, 90%, 95%, 97%, 98%, 99%, or 100% sequence identity to any one of the regulators described supra (e.g., any one of SEQ ID NOs: 231-290).

[0180] In one embodiment, the regulator sequence differs by no more than ten amino acids, e.g., by no more than five amino acids, by no more than four amino acids, by no more than three amino acids, by no more than two amino acids, or by one amino acid from the amino acid sequence of any one of the regulator described supra (e.g., any one of SEQ ID NOs: 231-290). In one embodiment, the regulator has an amino acid substitution, deletion, and/or insertion of one or more (e.g., two, several) of amino acid sequence of any one of the regulators described supra (e.g., any one of SEQ ID NOs: 231-290). In some embodiments, the total number of amino acid substitutions, deletions and/or insertions is not more than 10, e.g., not more than 9, 8, 7, 6, 5, 4, 3, 2, or 1.

[0181] In another embodiment, the heterologous polynucleotide encoding the regulator comprises a coding sequence having at least 60%, e.g., at least 65%, at least 70%, at least 75%, at least 80%, at least 85%, at least 90%, at least 95%, at least 96%, at least 97%, at least 98%, at least 99%, or 100% sequence identity to the coding sequence of any one of the regulators described supra (e.g., any one of SEQ ID NOs: 171-230).

[0182] In one embodiment, the heterologous polynucleotide encoding the regulator comprises or consists of the coding sequence of any one of the regulators described supra (e.g., any one of SEQ ID NOs: 171-230). In another embodiment, the heterologous polynucleotide encoding the regulator comprises a subsequence of the coding sequence of any one of the regulators described supra (e.g., any one of SEQ ID NOs: 171-230). In another embodiment, the number of nucleotides residues in the coding subsequence is at least 75%, e.g., at least 80%, 85%, 90%, or 95% of the number of the referenced coding sequence.

[0183] The referenced coding sequence of any related aspect or embodiment described herein can be the native coding sequence or a degenerate sequence, such as a codon-optimized coding sequence designed for use in a particular host cell (e.g., optimized for expression in Saccharomyces cerevisiae).

[0184] The regulator may be a fused polypeptide or cleavable fusion polypeptide, as described supra. 1993, EMBO J. 12: 2575-2583; Dawson et al., 1994, Science 266: 776-779).

[0185] In some embodiments, the fermenting organism (e.g., recombinant yeast cell) comprises a disruption to an endogenous regulator gene (e.g., any one of the regulator genes shown in Table 2, such as any one of SEQ ID NOs: 171-230). In some embodiments, the disrupted endogenous regulator gene is inactivated. In another embodiment, the coding sequence of the endogenous gene has at least 60%, e.g., at least 65%, at least 70%, at least 75%, at least 80%, at least 85%, at least 90%, at least 95%, at least 96%, at least 97%, at least 98%, at least 99%, or 100% sequence identity to the coding sequence of any one of the regulators described supra (e.g., any one of SEQ ID NOs: 171-230). In another embodiment, the endogenous gene encodes a regulator having at least 60%, e.g., at least 65%, at least 70%, at least 75%, at least 80%, at least 85%, at least 90%, at least 95%, at least 96%, at least 97%, at least 98%, at least 99%, or 100% sequence identity to the any one of the regulators described supra (e.g., any one of SEQ ID NOs: 231-290). Methods of gene disruption are described supra.

### Additional Gene Disruptions

[0186] The fermenting organisms described herein may also comprise one or more (e.g., two, several) gene disruptions, e.g., to divert sugar metabolism from undesired products to ethanol. In some aspects, the recombinant host cells produce a greater amount of ethanol compared to the cell without the one or more disruptions when cultivated under identical conditions. In some aspects, one or more of the disrupted endogenous genes is inactivated.

[0187] In certain embodiments, the recombinant cells provided herein comprise a disruption of one or more endogenous genes encoding enzymes involved in producing alternate fermentative products such as glycerol or other byproducts such as acetate or diols. For example, the cells provided herein may comprise a disruption of one or more of glycerol 3-phosphate dehydrogenase (GPD, catalyzes reaction of dihydroxyacetone phosphate to glycerol 3-phosphate), glycerol 3-phosphatase (GPP, catalyzes conversion of glycerol-3 phosphate to glycerol), glycerol kinase (catalyzes conversion of glycerol 3-phosphate to glycerol), dihydroxyacetone kinase (catalyzes conversion of dihydroxyacetone phosphate to dihydroxyacetone), glycerol dehydrogenase (catalyzes conversion of dihydroxyacetone to glycerol), and aldehyde dehydrogenase (ALD, e.g., converts acetaldehyde to acetate). Disruptions to GPD1/GPD2 and GPP1/GPP2 are discussed in, e.g., WO2014/180820 (the seqeuences of which are incorporated herein by reference). In some embodiments, the recombinant cells provided herein comprise a disruption to an aldose reductase (catalyzes conversion of xylose or xylulose to xylitol; e.g., GRE3 or YPR1; See, Traff et al., 2001, Appl. Environ. Microbiol. 67: 5668-74).

[0188] Modeling analysis can be used to design gene disruptions that additionally optimize utilization of the pathway. One exemplary computational method for identifying and designing metabolic alterations favoring biosynthesis of a desired product is the OptKnock computational framework, Burgard et al., 2003, Biotechnol. Bioeng. 84: 647-657.

[0189] The fermenting organisms comprising a gene disruption may be constructed using methods well known in the art, such as those described supra.

### Methods Using a Starch-Containing Material

[0190] In some aspects, the methods described herein produce a fermentation product from a starch-containing material. Starch-containing material is well-known in the art, contining two typs of homopolysaccharides (amylose and amylopectin) and is linked by alpha-(1-4)-D-glycosidic bonds. Any suitable starch-containing starting material may be used. The starting material is generally selected based on the desired fermentation product, such as ethanol. Examples of starch-containing starting materials include cereal, tubers or grains. Specifically, the starch-containing material may be corn, wheat, barley, rye, milo, sago, cassava, tapioca, sorghum, oat, rice, peas, beans, or sweet potatoes, or mixtures thereof. Contemplated are also waxy and non-waxy types of corn and barley.

[0191] In one embodiment, the starch-containing starting material is corn. In one embodiment, the starch-containing starting material is wheat. In one embodiment, the starch-containing starting material is barley. In one embodiment, the starch-containing starting material is rye. In one embodiment, the starch-containing starting material is milo. In one embodiment, the starch-containing starting material is sago. In one embodiment, the starch-containing starting material is cassava. In one embodiment, the starch-containing starting material is tapioca. In one embodiment, the starch-containing starting material is sorghum. In one embodiment, the starch-containing starting material is rice. In one embodiment, the starch-containing starting material is peas. In one embodiment, the starch-containing starting material is beans. In one embodiment, the starch-containing starting material is sweet potatoes. In one embodiment, the starch-containing starting material is oats.

[0192] The methods using a starch-containing material may include a conventional process (e.g., including a liquefaction step described in more detail below) or a raw starch hydrolysis process. In some embodiments using a starch-containing material, saccarification of the starch-containing material is at a temperature above the initial gelatinization temperature. In some embodiments using a starch-containing material, saccarification of the starch-containing material is at a temperature below the initial gelatinization temperature.

### Liquefaction

[0193] In aspects using a starch-containing material, the methods may further comprise a liquefaction step carried out by subjecting the starch-containing material at a temperature above the initial gelatinization temperature to an alpha-amylase and optionally a protease and/or a glucoamylase. Other enzymes such as a pullulanase, endoglucanase, hemicellulase (e.g., xylanase), phospholipase C, and phytase may also be present and/or added in liquefaction. In some embodiments, the liquefaction step is carried out prior to steps a) and b) of the described methods.

[0194] Liquefaction step may be carried out for 0.5-5 hours, such as 1-3 hours, such as typically about 2 hours.

[0195] The term “initial gelatinization temperature” means the lowest temperature at which gelatinization of the starch-containing material commences. In general, starch heated in water begins to gelatinize between about 50° C. and 75° C.; the exact temperature of gelatinization depends on the specific starch and can readily be determined by the skilled artisan. Thus, the initial gelatinization temperature may vary according to the plant species, to the particular variety of the plant species as well as with the growth conditions. The initial gelatinization temperature of a given starch-containing material may be determined as the temperature at which birefringence is lost in 5% of the starch granules using the method described by Gorinstein and Lii, 1992, Starch/Stärke 44(12): 461-466.

[0196] Liquefaction is typically carried out at a temperature in the range from 70-100° C. In one embodiment, the temperature in liquefaction is between 75-95° C., such as between 75-90° C., between 80-90° C., or between 82-88° C., such as about 85° C. In one embodiment, the temperature in liquefaction is greater than 85° C., such as about 88° C., about 89° C., about 90° C., about 91° C., about 92° C., about 93° C., about 94 ° C., or about 95° C.

[0197] A jet-cooking step may be carried out prior to liquefaction in step, for example, at a temperature between 110-145° C., 120-140° C., 125-135° C., or about 130° C. for about 1-15 minutes, for about 3-10 minutes, or about 5 minutes.

[0198] The pH during liquefaction may be e.g., between 4 and 7, such as pH 4.5-6.5, pH 5.0-6.5, pH 5.0-6.0, pH 5.2-6.2, or about 5.2, about 5.4, about 5.6, or about 5.8.

[0199] In one embodiment, the process further comprises, prior to liquifaction, the steps of:
[0200] i) reducing the particle size of the starch-containing material, preferably by dry milling;
[0201] ii) forming a slurry comprising the starch-containing material and water.

[0202] The starch-containing starting material, such as whole grains, may be reduced in particle size, e.g., by milling, in order to open up the structure, to increase surface area, and allowing for further processing. Generally, there are two types of processes: wet and dry milling. In dry milling whole kernels are milled and used. Wet milling gives a good separation of germ and meal (starch granules and protein). Wet milling is often applied at locations where the starch hydrolysate is used in production of, e.g., syrups. Both dry milling and wet milling are well known in the art of starch processing. In one embodiment the starch-containing material is subjected to dry milling. In one embodiment, the particle size is reduced to between 0.05 to 3.0 mm, e.g., 0.1-0.5 mm, or so that at least 30%, at least 50%, at least 70%, or at least 90% of the starch-containing material fit through a sieve with a 0.05 to 3.0 mm screen, e.g., 0.1-0.5 mm screen. In another embodiment, at least 50%, e.g., at least 70%, at least 80%, or at least 90% of the starch-containing material fit through a sieve with #6 screen.

[0203] The aqueous slurry may contain from 10-55 w/w-% dry solids (DS), e.g., 25-45 w/w-% dry solids (DS), or 30-40 w/w-% dry solids (DS) of starch-containing material.

[0204] The alpha-amylase, optionally a protease, and optionally a glucoamylase may initially be added to the aqueous slurry to initiate liquefaction (thinning). In one embodiment, only a portion of the enzymes (e.g., about ⅓) is added to the aqueous slurry, while the rest of the enzymes (e.g., about ⅔) are added during liquefaction step.

[0205] A non-exhaustive list of alpha-amylases used in liquefaction can be found below in the “Alpha-Amylases” section. Examples of suitable proteases used in liquefaction include any protease described in the “Proteases” section. Examples of suitable glucoamylases used in liquefaction include any glucoamylase found in the “Glucoamylases in Liquefaction” section.

### Alpha-Amylases

[0206] An alpha-amylase may be present and/or added in liquefaction optionally together with a protease, phytase, endoglucase, phospholipase C, xylanase, glucoamylase, and/or pullulanase, e.g., as disclosed in WO2012/088303 (Novozymes) or WO2013/082486 (Novozymes) which references are both incorporated by reference.

[0207] In some embodiments, the fermenting organism comprises a heterologous polynucleotide encoding an alpha-amylase, for example, as described in WO2017/087330, the content of which is hereby incorporated by reference. Any alpha-amylase described or referenced herein is contemplated for expression in the fermenting organism.

[0208] The alpha-amylase may be any alpha-amylase that is suitable for the host cells and/or the methods described herein, such as a naturally occurring alpha-amylase or a variant thereof that retains alpha-amylase activity.

[0209] In some embodiments, the fermenting organism comprising a heterologous polynucleotide encoding an alpha-amylase has an increased level of alpha-amylase activity compared to the host cells without the heterologous polynucleotide encoding the alpha-amylase, when cultivated under the same conditions. In some embodiments, the fermenting organism has an increased level of alpha-amylase activity of at least 5%, e.g., at least 10%, at least 15%, at least 20%, at least 25%, at least 50%, at least 100%, at least 150%, at least 200%, at least 300%, or at 500% compared to the fermenting organism without the heterologous polynucleotide encoding the alpha-amylase, when cultivated under the same conditions.

[0210] Exemplary alpha-amylases that can be used with the host cells and/or the methods described herein include bacterial, yeast, or filamentous fungal alpha-amylases, e.g., derived from any of the microorganisms described or referenced herein.

[0211] The term “bacterial alpha-amylase” means any bacterial alpha-amylase classified under EC 3.2.1.1. A bacterial alpha-amylase used herein may, e.g., be derived from a strain of the genus Bacillus, which is sometimes also referred to as the genus Geobacillus. In one embodiment, the Bacillus alpha-amylase is derived from a strain of Bacillus amyloliquefaciens, Bacillus licheniformis, Bacillus stearothermophilus, or Bacillus subtilis, but may also be derived from other Bacillus sp.

[0212] Specific examples of bacterial alpha-amylases include the Bacillus stearothermophilus alpha-amylase (BSG) of SEQ ID NO: 3 in WO99/19467, the Bacillus amyloliquefaciens alpha-amylase (BAN) of SEQ ID NO: 5 in WO99/19467, and the Bacillus licheniformis alpha-amylase (BLA) of SEQ ID NO: 4 in WO99/19467 (all sequences are hereby incorporated by reference). In one embodiment, the alpha-amylase may be an enzyme having a degree of identity of at least 60%, e.g., at least 70%, at least 80%, at least 90%, at least 95%, at least 96%, at least 97%, at least 98% or at least 99% to any of the sequences shown in SEQ ID NOS: 3, 4 or 5, respectively, in WO99/19467.

[0213] In one embodiment, the alpha-amylase may be an enzyme having a degree of identity of at least 60%, e.g., at least 70%, at least 80%, at least 90%, at least 91%, at least 92%, at least 93%, at least 94%, at least 95%, at least 96%, at least 97%, at least 98% or at least 99% to any of the sequences shown in SEQ ID NO: 3 in WO99/19467.

[0214] In one embodiment, the alpha-amylase is derived from Bacillus stearothermophilus. The Bacillus stearothermophilus alpha-amylase may be a mature wild-type or a mature variant thereof. The mature Bacillus stearothermophilus alpha-amylases may naturally be truncated during recombinant production. For instance, the Bacillus stearothermophilus alpha-amylase may be a truncated at the C-terminal, so that it is from 480-495 amino acids long, such as about 491 amino acids long, e.g., so that it lacks a functional starch binding domain (compared to SEQ ID NO: 3 in WO99/19467).

[0215] The Bacillus alpha-amylase may also be a variant and/or hybrid. Examples of such a variant can be found in any of WO96/23873, WO96/23874, WO97/41213, WO99/19467, WO00/60059, and WO02/10355 (each hereby incorporated by reference). Specific alpha-amylase variants are disclosed in U.S. Pat. Nos. 6,093,562, 6,187,576, 6,297,038, and 7,713,723 (hereby incorporated by reference) and include Bacillus stearothermophilus alpha-amylase (often referred to as BSG alpha-amylase) variants having a deletion of one or two amino acids at positions R179, G180, I181 and/or G182, preferably a double deletion disclosed in WO96/23873—See, e.g., page 20, lines 1-10 (hereby incorporated by reference), such as corresponding to deletion of positions I181 and G182 compared to the amino acid sequence of Bacillus stearothermophilus alpha-amylase set forth in SEQ ID NO: 3 disclosed in WO99/19467 or the deletion of amino acids R179 and G180 using SEQ ID NO: 3 in WO99/19467 for numbering (which reference is hereby incorporated by reference). In some embodimenst, the Bacillus alpha-amylases, such as Bacillus stearothermophilus alpha-amylases, have a double deletion corresponding to a deletion of positions 181 and 182 and further optionally comprise a N193F substitution (also denoted I181*+G182*+N193F) compared to the wild-type BSG alpha-amylase amino acid sequence set forth in SEQ ID NO: 3 disclosed in WO 99/19467. The bacterial alpha-amylase may also have a substitution in a position corresponding to S239 in the Bacillus licheniformis alpha-amylase shown in SEQ ID NO: 4 in WO99/19467, or a S242 and/or E188P variant of the Bacillus stearothermophilus alpha-amylase of SEQ ID NO: 3 in WO99/19467.

[0216] In one embodiment, the variant is a S242A, E or Q variant, e.g., a S242Q variant, of the Bacillus stearothermophilus alpha-amylase.

[0217] In one embodiment, the variant is a position E188 variant, e.g., E188P variant of the Bacillus stearothermophilus alpha-amylase.

[0218] The bacterial alpha-amylase may, in one embodiment, be a truncated Bacillus alpha-amylase. In one embodiment, the truncation is so that, e.g., the Bacillus stearothermophilus alpha-amylase shown in SEQ ID NO: 3 in WO99/19467, is about 491 amino acids long, such as from 480 to 495 amino acids long, or so it lacks a functional starch bind domain.

[0219] The bacterial alpha-amylase may also be a hybrid bacterial alpha-amylase, e.g., an alpha-amylase comprising 445 C-terminal amino acid residues of the Bacillus licheniformis alpha-amylase (shown in SEQ ID NO: 4 of WO 99/19467) and the 37 N-terminal amino acid residues of the alpha-amylase derived from Bacillus amyloliquefaciens (shown in SEQ ID NO: 5 of WO 99/19467). In one embodiment, this hybrid has one or more, especially all, of the following substitutions: G48A+T49I+G107A+H156Y+A181T+N190F+I201F+A209V+Q264S (using the Bacillus licheniformis numbering in SEQ ID NO: 4 of WO 99/19467). In some embodiments, the variants have one or more of the following mutations (or corresponding mutations in other Bacillus alpha-amylases): H154Y, A181T, N190F, A209V and Q264S and/or the deletion of two residues between positions 176 and 179, e.g., deletion of E178 and G179 (using SEQ ID NO: 5 of WO 99/19467 for position numbering).

[0220] In one embodiment, the bacterial alpha-amylase is the mature part of the chimeric alpha-amylase disclosed in Richardson et al. (2002), The Journal of Biological Chemistry, Vol. 277, No 29, Issue 19 July, pp. 267501-26507, referred to as BD5088 or a variant thereof. This alpha-amylase is the same as the one shown in SEQ ID NO: 2 in WO2007/134207. The mature enzyme sequence starts after the initial “Met” amino acid in position 1.

[0221] The alpha-amylase may be a thermostable alpha-amylase, such as a thermostable bacterial alpha-amylase, e.g., from Bacillus stearothermophilus. In one embodiment, the alpha-amylase used in a process described herein has a T½ (min) at pH 4.5, 85° C., 0.12 mM CaCl₂ of at least 10 determined as described in Example 1 of WO2018/098381.

[0222] In one embodiment, the thermostable alpha-amylase has a T½ (min) at pH 4.5, 85° C., 0.12 mM CaCl₂, of at least 15. In one embodiment, the thermostable alpha-amylase has a T½ (min) at pH 4.5, 85° C., 0.12 mM CaCl₂, of as at least 20. In one embodiment, the thermostable alpha-amylase has a T½ (min) at pH 4.5, 85° C., 0.12 mM CaCl₂, of as at least 25. In one embodiment, the thermostable alpha-amylase has a T½ (min) at pH 4.5, 85° C., 0.12 mM CaCl₂, of as at least 30. In one embodiment, the thermostable alpha-amylase has a T½ (min) at pH 4.5, 85° C., 0.12 mM CaCl₂, of as at least 40.

[0223] In one embodiment, the thermostable alpha-amylase has a T½ (min) at pH 4.5, 85° C., 0.12 mM CaCl₂, of at least 50. In one embodiment, the thermostable alpha-amylase has a T½ (min) at pH 4.5, 85° C., 0.12 mM CaCl₂, of at least 60. In one embodiment, the thermostable alpha-amylase has a T½ (min) at pH 4.5, 85° C., 0.12 mM CaCl₂, between 10-70. In one embodiment, the thermostable alpha-amylase has a T½ (min) at pH 4.5, 85° C., 0.12 mM CaCl₂, between 15-70. In one embodiment, the thermostable alpha-amylase has a T½ (min) at pH 4.5, 85° C., 0.12 mM CaCl₂, between 20-70. In one embodiment, the thermostable alpha-amylase has a T½ (min) at pH 4.5, 85° C., 0.12 mM CaCl₂, between 25-70. In one embodiment, the thermostable alpha-amylase has a T½ (min) at pH 4.5, 85° C., 0.12 mM CaCl₂, between 30-70. In one embodiment, the thermostable alpha-amylase has a T½ (min) at pH 4.5, 85° C., 0.12 mM CaCl₂, between 40-70. In one embodiment, the thermostable alpha-amylase has a T½ (min) at pH 4.5, 85° C., 0.12 mM CaCl₂, between 50-70. In one embodiment, the thermostable alpha-amylase has a T½ (min) at pH 4.5, 85° C., 0.12 mM CaCl₂, between 60-70.

[0224] In one embodiment, the alpha-amylase is a bacterial alpha-amylase, e.g., derived from the genus Bacillus, such as a strain of Bacillus stearothermophilus, e.g., the Bacillus stearothermophilus as disclosed in WO 99/019467 as SEQ ID NO: 3 with one or two amino acids deleted at positions R179, G180, I181 and/or G182, in particular with R179 and G180 deleted, or with I181 and G182 deleted, with mutations in below list of mutations.

[0225] In some embodiment, the Bacillus stearothermophilus alpha-amylases have double deletion I181+G182, and optional substitution N193F, further comprising one of the following substitutions or combinations of substitutions:

[0226] V59A+Q89R+G112 D+E129V+K177L+R179E+K220P+N224L+Q254S;

[0227] V59A+Q89R+E129V+K177L+R179E+H208Y+K220P+N224L+Q254S;

[0228] V59A+Q89R+E129V+K177L+R179E+K220P+N224L+Q254S+D269E+D281N;

[0229] V59A+Q89R+E129V+K177L+R179E+K220P+N224L+Q254S+I270L;

[0230] V59A+Q89R+E129V+K177L+R179E+K220P+N224L+Q254S+H274K;

[0231] V59A+Q89R+E129V+K177L+R179E+K220P+N224L+Q254S+Y276F;

[0232] V59A+E129V+R157Y+K177L+R179E+K220P+N224L+S242Q+Q254S;

[0233] V59A+E129V+K177L+R179E+H208Y+K220P+N224L+S242Q+Q254S;

[0234] V59A+E129V+K177L+R179E+K220P+N224L+S242Q+Q254S;

[0235] V59A+E129V+K177L+R179E+K220P+N224L+S242Q+Q254S+H274K;

[0236] V59A+E129V+K177L+R179E+K220P+N224L+S242Q+Q254S+Y276F;

[0237] V59A+E129V+K177L+R179E+K220P+N224L+S242Q+Q254S+D281N;

[0238] V59A+E129V+K177L+R179E+K220P+N224L+S242Q+Q254S+M284T;

[0239] V59A+E129V+K177L+R179E+K220P+N224L+S242Q+Q254S+G416V;

[0240] V59A+E129V+K177L+R179E+K220P+N224L+Q254S;

[0241] V59A+E129V+K177L+R179E+K220P+N224L+Q254S+M284T;

[0242] A91L+M96I+E129V+K177L+R179E+K220P+N224L+S242Q+Q254S;

[0243] E129V+K177L+R179E;

[0244] E129V+K177L+R179E+K220P+N224L+S242Q+Q254S;

[0245] E129V+K177L+R179E+K220P+N224L+S242Q+Q254S+Y276F+L427M;

[0246] E129V+K177L+R179E+K220P+N224L+S242Q+Q254S+M284T;

[0247] E129V+K177L+R179E+K220P+N224L+5242Q+Q2545+N376*+1377*;

[0248] E129V+K177L+R179E+K220P+N224L+Q254S;

[0249] E129V+K177L+R179E+K220P+N224L+Q254S+M284T;

[0250] E129V+K177L+R179E+S242Q;

[0251] E129V+K177L+R179V+K220P+N224L+S242Q+Q254S;

[0252] K220P+N224L+S242Q+Q254S;

[0253] M284V;

[0254] V59A+Q89R+E129V+K177L+R179E+Q254S+M284V; and

[0255] V59A+E129V+K177L+R179E+Q254S+M284V;

[0256] In one embodiment, the alpha-amylase is selected from the group of Bacillus stearothermophilus alpha-amylase variants with double deletion I181*+G182*, and optionally substitution N193F, and further one of the following substitutions or combinations of substitutions:

[0257] E129V+K177L+R179E;

[0258] V59A+Q89R+E129V+K177L+R179E+H208Y+K220P+N224L+Q254S;

[0259] V59A+Q89R+E129V+K177L+R179E+Q254S+M284V;

[0260] V59A+E129V+K177L+R179E+Q254S+M284V; and

[0261] E129V+K177L+R179E+K220P+N224L+S242Q+Q254S (using SEQ ID NO: 1 herein for numbering).

[0262] It should be understood that when referring to Bacillus stearothermophilus alpha-amylase and variants thereof they are normally produced in truncated form. In particular, the truncation may be so that the Bacillus stearothermophilus alpha-amylase shown in SEQ ID NO: 3 in WO 99/19467, or variants thereof, are truncated in the C-terminal and are typically from 480-495 amino acids long, such as about 491 amino acids long, e.g., so that it lacks a functional starch binding domain.

[0263] In one embodiment, the alpha-amylase variant may be an enzyme having a degree of identity of at least 60%, e.g., at least 70%, at least 80%, at least 90%, at least 95%, at least 91%, at least 92%, at least 93%, at least 94%, at least 95%, at least 96%, at least 97%, at least 98% or at least 99%, but less than 100% to the sequence shown in SEQ ID NO: 3 in WO 99/19467.

[0264] In one embodiment, the bacterial alpha-amylase, e.g., Bacillus alpha-amylase, such as especially Bacillus stearothermophilus alpha-amylase, or variant thereof, is dosed to liquefaction in a concentration between 0.01-10 KNU-A/g DS, e.g., between 0.02 and 5 KNU-A/g DS, such as 0.03 and 3 KNU-A, preferably 0.04 and 2 KNU-A/g DS, such as especially 0.01 and 2 KNU-A/g DS. In one embodiment, the bacterial alpha-amylase, e.g., Bacillus alpha-amylase, such as especially Bacillus stearothermophilus alpha-amylases, or variant thereof, is dosed to liquefaction in a concentration of between 0.0001-1 mg EP (Enzyme Protein)/g DS, e.g., 0.0005-0.5 mg EP/g DS, such as 0.001-0.1 mg EP/g DS.

[0265] In one embodiment, the bacterial alpha-amylase is derived from a Bacillus subtilis alpha-amylase (SEQ ID NOs: 76, 83 or 84 of WO2018/222990), a Bacillus subtilis alpha-amylase (SEQ ID NO: 82 of WO2018/222990), a Bacillus licheniformis alpha-amylase (SEQ ID NO: 85 of WO2018/222990), a Clostridium phytofermentans alpha-amylase (SEQ ID NOs: 89-94 of WO2018/222990), a Clostridium thermocellum alpha-amylase (SEQ ID NO: 95 of WO2018/222990), a Thermobifida fusca alpha-amylase (SEQ ID NOs: 96 or 97 of WO2018/222990), a Thermobifida fusca alpha-amylase (SEQ ID NO: 97 or of WO2018/222990), a Anaerocellum thermophilum (SEQ ID NOs: 98, 99, or 100 of WO2018/222990), or a Streptomyces avermitilis alpha amylase (SEQ ID NO: 88 or 101 of WO2018/222990).

[0266] In one embodiment, the alpha-amylase is derived from a yeast alpha-amylase, such as the Saccharomycopsis fibuligera alpha-amylase (SEQ ID NO: 77 of WO2018/222990), a Debaryomyces occidentalis alpha-amylase (SEQ ID NOs: 78 or 79 of WO2018/222990), or a Lipomyces kononenkoae alpha-amylase (SEQ ID NO: 80 or 81 of WO2018/222990).

[0267] In one embodiment, the alpha-amylase is derived from a filamentous fungal alpha-amylase, such as an Aspergillus niger alpha-amylase (SEQ ID NO: 86 or 87 of WO2018/222990).

[0268] Additional alpha-amylases contemplated for use with the present invention can be found in WO2011/153516 (the content of which is incorporated herein).

[0269] Additional polynucleotides encoding suitable alpha-amylases may be obtained from microorganisms of any genus, including those readily available within the UniProtKB database (www.uniprot.org).

[0270] The alpha-amylase coding sequences can also be used to design nucleic acid probes to identify and clone DNA encoding alpha-amylases from strains of different genera or species, as described supra.

[0271] The polynucleotides encoding alpha-amylases may also be identified and obtained from other sources including microorganisms isolated from nature (e.g., soil, composts, water, etc.) or DNA samples obtained directly from natural materials (e.g., soil, composts, water, etc,) as described supra.

[0272] Techniques used to isolate or clone polynucleotides encoding alpha-amylases are described supra.

[0273] In one embodiment, the alpha-amylase has at least 60%, e.g., at least 65%, at least 70%, at least 75%, at least 80%, at least 85%, at least 90%, at least 91%, at least 92%, at least 93%, at least 94%, at least 95%, at least 96%, at least 97%, at least 98%, at least 99%, or 100% sequence identity to any alpha-amylase described or referenced herein (e.g., the Debaryomyces occidentalis alpha-amylase shown as SEQ ID NO: 79 of WO2018/222990). In one aspect, the alpha-amylase sequence differs by no more than ten amino acids, e.g., by no more than five amino acids, by no more than four amino acids, by no more than three amino acids, by no more than two amino acids, or by one amino acid from any alpha-amylase described or referenced herein (e.g., the Debaryomyces occidentalis alpha-amylase shown as SEQ ID NO: 79 of WO2018/222990). In one embodiment, the alpha-amylase comprises or consists of the amino acid sequence of any alpha-amylase described or referenced herein (e.g., the Debaryomyces occidentalis alpha-amylase shown as SEQ ID NO: 79 of WO2018/222990), allelic variant, or a fragment thereof having alpha-amylase activity. In one embodiment, the alpha-amylase has an amino acid substitution, deletion, and/or insertion of one or more (e.g., two, several) amino acids. In some embodiments, the total number of amino acid substitutions, deletions and/or insertions is not more than 10, e.g., not more than 9, 8, 7, 6, 5, 4, 3, 2, or 1.

[0274] In some embodiments, the alpha-amylase has at least 20%, e.g., at least 40%, at least 50%, at least 60%, at least 70%, at least 80%, at least 90%, at least 95%, at least 96%, at least 97%, at least 98%, at least 99%, or 100% of the alpha-amylase activity of any alpha-amylase described or referenced herein (e.g., the Debaryomyces occidentalis alpha-amylase shown as SEQ ID NO: 79 of WO2018/222990) under the same conditions.

[0275] In one embodiment, the alpha-amylase coding sequence hybridizes under at least low stringency conditions, e.g., medium stringency conditions, medium-high stringency conditions, high stringency conditions, or very high stringency conditions with the full-length complementary strand of the coding sequence from any alpha-amylase described or referenced herein (e.g., the Debaryomyces occidentalis alpha-amylase shown as SEQ ID NO: 79 of WO2018/222990). In one embodiment, the alpha-amylase coding sequence has at least 65%, e.g., at least 70%, at least 75%, at least 80%, at least 85%, at least 85%, at least 90%, at least 91%, at least 92%, at least 93%, at least 94%, at least 95%, at least 96%, at least 97%, at least 98%, at least 99%, or 100% sequence identity with the coding sequence from any alpha-amylase described or referenced herein (e.g., the Debaryomyces occidentalis alpha-amylase shown as SEQ ID NO: 79 of WO2018/222990).

[0276] In one embodiment, the polynucleotide encoding the alpha-amylase comprises the coding sequence of any alpha-amylase described or referenced herein (e.g., the Debaryomyces occidentalis alpha-amylase shown as SEQ ID NO: 79 of WO2018/222990). In one embodiment, the polynucleotide encoding the alpha-amylase comprises a subsequence of the coding sequence from any alpha-amylase described or referenced herein, wherein the subsequence encodes a polypeptide having alpha-amylase activity. In one embodiment, the number of nucleotides residues in the subsequence is at least 75%, e.g., at least 80%, 85%, 90%, or 95% of the number of the referenced coding sequence.

[0277] The alpha-amylase can also include fused polypeptides or cleavable fusion polypeptides, as described supra.

### Proteases

[0278] In the processes described herein, a protease may optionally be present and/or added in slurry and/or liquefaction together with alpha-amylase, and an optional glucoamylase, phospholipase C, xylanase, endoglucanase, phytase, and/or pullulanase.

[0279] Proteases are classified on the basis of their catalytic mechanism into the following groups: Serine proteases (S), Cysteine proteases (C), Aspartic proteases (A), Metallo proteases (M), and Unknown, or as yet unclassified, proteases (U), see Handbook of Proteolytic Enzymes, A. J. Barrett, N. D. Rawlings, J. F. Woessner (eds), Academic Press (1998), in particular the general introduction part.

[0280] In some embodiments, the fermenting organism comprises a heterologous polynucleotide encoding a protease, for example, as described in WO2018/222990, the content of which is hereby incorporated by reference. Any protease described or referenced herein is contemplated for expression in the fermenting organism.

[0281] The protease may be any protease that is suitable for the host cells and/or the methods described herein, such as a naturally occurring protease or a variant thereof that retains protease activity.

[0282] In some embodiments, the fermenting organism comprising a heterologous polynucleotide encoding a protease has an increased level of protease activity compared to the host cells without the heterologous polynucleotide encoding the protease, when cultivated under the same conditions. In some embodiments, the fermenting organism has an increased level of protease activity of at least 5%, e.g., at least 10%, at least 15%, at least 20%, at least 25%, at least 50%, at least 100%, at least 150%, at least 200%, at least 300%, or at 500% compared to the fermenting organism without the heterologous polynucleotide encoding the protease, when cultivated under the same conditions.

[0283] Exemplary proteases that can be used with the host cells and/or the methods described herein include bacterial, yeast, or filamentous fungal proteases, e.g., derived from any of the microorganisms described or referenced herein.

[0284] In one embodiment, the thermostable protease used according to a process described herein is a “metallo protease” defined as a protease belonging to EC 3.4.24 (metalloendopeptidases); preferably EC 3.4.24.39 (acid metallo proteinases).

[0285] To determine whether a given protease is a metallo protease or not, reference is made to the above “Handbook of Proteolytic Enzymes” and the principles indicated therein. Such determination can be carried out for all types of proteases, be it naturally occurring or wild-type proteases; or genetically engineered or synthetic proteases.

[0286] Protease activity can be measured using any suitable assay, in which a substrate is employed, that includes peptide bonds relevant for the specificity of the protease in question. Assay-pH and assay-temperature are likewise to be adapted to the protease in question. Examples of assay-pH-values are pH 6, 7, 8, 9, 10, or 11. Examples of assay-temperatures are 30, 35, 37, 40, 45, 50, 55, 60, 65, 70 or 80° C.

[0287] Examples of protease substrates are casein, such as Azurine-Crosslinked Casein (AZCL-casein).

[0288] In one embodiment, the thermostable protease has at least 20%, such as at least 30%, such as at least 40%, such as at least 50%, such as at least 60%, such as at least 70%, such as at least 80%, such as at least 90%, such as at least 95%, such as at least 100% of the protease activity of the Protease 196 variant or Protease Pfu.

[0289] There are no limitations on the origin of the protease used in a process described herein as long as it fulfills the thermostability properties defined below.

[0290] In one embodiment the protease is of fungal origin.

[0291] The protease may be a variant of, e.g., a wild-type protease as long as the protease has the thermostability properties defined herein. In one embodiment, the thermostable protease is a variant of a metallo protease as defined above. In one embodiment, the thermostable protease used in a process described herein is of fungal origin, such as a fungal metallo protease, such as a fungal metallo protease derived from a strain of the genus Thermoascus, preferably a strain of Thermoascus aurantiacus, especially Thermoascus aurantiacus CGMCC No. 0670 (classified as EC 3.4.24.39).

[0292] In one embodiment, the thermostable protease is a variant of the mature part of the metallo protease shown in SEQ ID NO: 2 disclosed in WO2003/048353 or the mature part of SEQ ID NO: 1 in WO2010/008841 (SEQ ID NO: 292 herein) further with one of the following substitutions or combinations of substitutions:

[0293] S5*+D79L+S87P+A112P+D142L;

[0294] D79L+S87P+A112P+T124V+D142L;

[0295] S5*+N26R+D79L+S87P+A112P+D142L;

[0296] N26R+T46R+D79L+S87P+A112P+D142L;

[0297] T46R+D79L+S87P+T116V+D142L;

[0298] D79L+P81R+S87P+A112P+D142L;

[0299] A27K+D79L+S87P+A112P+T124V+D142L;

[0300] D79L+Y82F+S87P+A112P+T124V+D142L;

[0301] D79L+Y82F+S87P+A112P+T124V+D142L;

[0302] D79L+S87P+A112P+T124V+A126V+D142L;

[0303] D79L+S87P+A112P+D142L;

[0304] D79L+Y82F+S87P+A112P+D142L;

[0305] S38T+D79L+S87P+A112P+A126V+D142L;

[0306] D79L+Y82F+S87P+A112P+A126V+D142L;

[0307] A27K+D79L+S87P+A112P+A126V+D142L;

[0308] D79L+S87P+N98C+A112P+G135C+D142L;

[0309] D79L+S87P+A112P+D142L+T141C+M161C;

[0310] S36P+D79L+S87P+A112P+D142L;

[0311] A37P+D79L+S87P+A112P+D142L;

[0312] S49P+D79L+S87P+A112P+D142L;

[0313] S50P+D79L+S87P+A112P+D142L;

[0314] D79L+S87P+D104P+A112P+D142L;

[0315] D79L+Y82F+S87G+A112P+D142L;

[0316] S70V+D79L+Y82F+S87G+Y97W+A112P+D142L;

[0317] D79L+Y82F+S87G+Y97W+D104P+A112P+D142L;

[0318] S70V+D79L+Y82F+S87G+A112P+D142L;

[0319] D79L+Y82F+S87G+D104P+A112P+D142L;

[0320] D79L+Y82F+S87G+A112P+A126V+D142L;

[0321] Y82F+S87G+S70V+D79L+D104P+A112P+D142L;

[0322] Y82F+S87G+D79L+D104P+A112P+A126V+D142L;

[0323] A27K+D79L+Y82F+S87G+D104P+A112P+A126V+D142L;

[0324] A27K+Y82F+S87G+D104P+A112P+A126V+D142L;

[0325] A27K+D79L+Y82F+D104P+A112P+A126V+D142L;

[0326] A27K+Y82F+D104P+A112P+A126V+D142L;

[0327] A27K+D79L+S87P+A112P+D142L; and

[0328] D79L+S87P+D142L.

[0329] In one embodiment, the thermostable protease is a variant of the metallo protease disclosed as the mature part of SEQ ID NO: 2 disclosed in WO 2003/048353 or the mature part of SEQ ID NO: 1 in WO 2010/008841 (SEQ ID NO: 292 herein) with one of the following substitutions or combinations of substitutions:

[0330] D79L+S87P+A112P+D142L;

[0331] D79L+S87P+D142L; and

[0332] A27K+D79L+Y82F+S87G+D104P+A112P+A126V+D142L.

[0333] In one embodiment, the protease variant has at least 75% identity preferably at least 80%, more preferably at least 85%, more preferably at least 90%, more preferably at least 91%, more preferably at least 92%, even more preferably at least 93%, most preferably at least 94%, and even most preferably at least 95%, such as even at least 96%, at least 97%, at least 98%, at least 99%, but less than 100% identity to the mature part of the polypeptide of SEQ ID NO: 2 disclosed in WO 2003/048353 or the mature part of SEQ ID NO: 1 in WO 2010/008841 (SEQ ID NO: 292 herein).

[0334] The thermostable protease may also be derived from any bacterium as long as the protease has the thermostability properties.

[0335] In one embodiment, the thermostable protease is derived from a strain of the bacterium Pyrococcus, such as a strain of Pyrococcus furiosus (pfu protease), for example, the Pyrococcus furiosus protease of SEQ ID NO: 291 or a variant thereof having at least 80% identity, such as at least 85%, such as at least 90%, such as at least 95%, such as at least 96%, such as at least 97%, such as at least 98%, such as at least 99% identity thereto.

[0336] In one embodiment, the protease is one shown as SEQ ID NO: 1 of U.S. Pat. No. 6,358,726-B1 (Takara Shuzo Company).

[0337] In one embodiment, the thermostable protease is a protease having at least 80% identity, such as at least 85%, such as at least 90%, such as at least 95%, such as at least 96%, such as at least 97%, such as at least 98%, such as at least 99% identity to SEQ ID NO: 1 of U.S. Pat. No. 6,358,726-B1. The Pyroccus furiosus protease can be purchased from Takara Bio, Japan.

[0338] The Pyrococcus furiosus protease is a thermostable protease. The commercial product Pyrococcus furiosus protease (PfuS) was found to have a thermostability of 110% (80° C./70° C.) and 103% (90° C./70° C.) at pH 4.5.

[0339] In one embodiment, a thermostable protease used in a process described herein has a thermostability value of more than 20% determined as Relative Activity at 80° C./70° C.

[0340] In one embodiment, the protease has a thermostability of more than 30%, more than 40%, more than 50%, more than 60%, more than 70%, more than 80%, more than 90%, more than 100%, such as more than 105%, such as more than 110%, such as more than 115%, such as more than 120% determined as Relative Activity at 80° C./70° C.

[0341] In one embodiment, protease has a thermostability of between 20 and 50%, such as between 20 and 40%, such as 20 and 30% determined as Relative Activity at 80° C./70° C. In one embodiment, the protease has a thermostability between 50 and 115%, such as between 50 and 70%, such as between 50 and 60%, such as between 100 and 120%, such as between 105 and 115% determined as Relative Activity at 80° C./70° C.

[0342] In one embodiment, the protease has a thermostability value of more than 10% determined as Relative Activity at 85° C./70° C.

[0343] In one embodiment, the protease has a thermostability of more than 10%, such as more than 12%, more than 14%, more than 16%, more than 18%, more than 20%, more than 30%, more than 40%, more that 50%, more than 60%, more than 70%, more than 80%, more than 90%, more than 100%, more than 110% determined as Relative Activity at 85° C./70° C.

[0344] In one embodiment, the protease has a thermostability of between 10% and 50%, such as between 10% and 30%, such as between 10% and 25% determined as Relative Activity at 85° C./70° C.

[0345] In one embodiment, the protease has more than 20%, more than 30%, more than 40%, more than 50%, more than 60%, more than 70%, more than 80%, more than 90% determined as Remaining Activity at 80° C.; and/or the protease has more than 20%, more than 30%, more than 40%, more than 50%, more than 60%, more than 70%, more than 80%, more than 90% determined as Remaining Activity at 84° C.

[0346] Determination of “Relative Activity” and “Remaining Activity” is done as described in the art (e.g., WO2018/098381).

[0347] In one embodiment, the protease may have a themostability for above 90, such as above 100 at 85° C. as determined using a Zein-BCA assay.

[0348] In one embodiment, the protease has a themostability above 60%, such as above 90%, such as above 100%, such as above 110% at 85° C. as determined using a Zein-BCA assay.

[0349] In one embodiment, protease has a themostability between 60-120, such as between 70-120%, such as between 80-120%, such as between 90-120%, such as between 100-120%, such as 110-120% at 85° C. as determined using a Zein-BCA assay.

[0350] In one embodiment, the thermostable protease has at least 20%, such as at least 30%, such as at least 40%, such as at least 50%, such as at least 60%, such as at least 70%, such as at least 80%, such as at least 90%, such as at least 95%, such as at least 100% of the activity of the JTP196 protease variant or Protease Pfu determined by a AZCL-casein assay.

[0351] Additional proteases contemplated for use with the present invention can be found in WO2018/222990 (the content of which is incorporated herein).

[0352] Additional polynucleotides encoding suitable proteases may be obtained from microorganisms of any genus, including those readily available within the UniProtKB database (www.uniprot.org).

[0353] The protease coding sequences can also be used to design nucleic acid probes to identify and clone DNA encoding proteases from strains of different genera or species, as described supra.

[0354] The polynucleotides encoding proteases may also be identified and obtained from other sources including microorganisms isolated from nature (e.g., soil, composts, water, etc.) or DNA samples obtained directly from natural materials (e.g., soil, composts, water, etc,) as described supra.

[0355] Techniques used to isolate or clone polynucleotides encoding proteases are described supra.

[0356] The protease can also include fused polypeptides or cleavable fusion polypeptides, as described supra.

[0357] In one embodiment, the thermostable protease is a serine protease, e.g., an S8 protease, such as one disclosed in PCT/US2018/054212, filed on Oct. 3, 2018, which is hereby incorporated herein by reference in its entirety.

[0358] In an embodiment, the S8 protease is derived from Palaeococcus, for instance Palaeococcus ferrophilus, such as the Palaeococcus ferrophilus S8 protease of SEQ ID NO: 293, or a variant thereof having at least 60% identity, preferably at least 65% identity, preferably at least 70% identity, at least 75% identity preferably at least 80%, more preferably at least 85%, more preferably at least 90%, more preferably at least 91%, more preferably at least 92%, even more preferably at least 93%, most preferably at least 94%, and even most preferably at least 95%, such as even at least 96%, at least 97%, at least 98%, or at least 99%, but less than 100% identity to the amino acid sequence of SEQ ID NO: 293.

[0359] In an embodiment, the S8 protease is derived from Thermococcus, for instance Thermococcus litoralis or Thermococcus thioreducens, such as the Thermococcus litoralis S8 protease of SEQ ID NO: 294, or a variant thereof having at least 60% identity, preferably at least 65% identity, preferably at least 70% identity, at least 75% identity preferably at least 80%, more preferably at least 85%, more preferably at least 90%, more preferably at least 91%, more preferably at least 92%, even more preferably at least 93%, most preferably at least 94%, and even most preferably at least 95%, such as even at least 96%, at least 97%, at least 98%, or at least 99%, but less than 100% identity to the amino acid sequence of SEQ ID NO: 294, or the Thermococcus thioreducens S8 protease of SEQ ID NO: 295, or a variant thereof having at least 60% identity, preferably at least 65% identity, preferably at least 70% identity, at least 75% identity preferably at least 80%, more preferably at least 85%, more preferably at least 90%, more preferably at least 91%, more preferably at least 92%, even more preferably at least 93%, most preferably at least 94%, and even most preferably at least 95%, such as even at least 96%, at least 97%, at least 98%, or at least 99%, but less than 100% identity to the amino acid sequence of SEQ ID NO: 295.

### Glucoamylase in Liquefaction

[0360] A glucoamylase may optionally be present and/or added in liquefaction step step and/or the slurry prior to optional jet cook and/or liquefaction. In one embodiment, the glucoamylase is added together with or separately from the alpha-amylase and/or the optional protease, endoglucanase, phospholipase C, xylanase, phytase, and/or pullulanase.

[0361] In some embodiments, the fermenting organism comprises a heterologous polynucleotide encoding a glucoamylase, for example, as described in WO2017/087330, the content of which is hereby incorporated by reference. Any glucoamylase described or referenced herein is contemplated for expression in the fermenting organism.

[0362] The glucoamylase may be any glucoamylase that is suitable for the host cells and/or the methods described herein, such as a naturally occurring glucoamylase or a variant thereof that retains glucoamylase activity. The Glucoamylase in liquefcation may be any glucoamylase described in this section and/or any glucoamylase described in “Glucoamylase in Saccharification and/or Fermentation” described below.

[0363] In some embodiments, the fermenting organism comprising a heterologous polynucleotide encoding an glucoamylase has an increased level of glucoamylase activity compared to the host cells without the heterologous polynucleotide encoding the glucoamylase, when cultivated under the same conditions. In some embodiments, the fermenting organism has an increased level of glucoamylase activity of at least 5%, e.g., at least 10%, at least 15%, at least 20%, at least 25%, at least 50%, at least 100%, at least 150%, at least 200%, at least 300%, or at 500% compared to the fermenting organism without the heterologous polynucleotide encoding the glucoamylase, when cultivated under the same conditions.

[0364] Exemplary glucoamylases that can be used with the host cells and/or the methods described herein include bacterial, yeast, or filamentous fungal glucoamylases, e.g., obtained from any of the microorganisms described or referenced herein, as described supra.

[0365] In one embodiment, the glucoamylase has a Relative Activity heat stability at 85° C. of at least 20%, at least 30%, or at least 35% determined as described in Example 4 of WO2018/098381 (heat stability).

[0366] In one embodiment, the glucoamylase has a relative activity pH optimum at pH 5.0 of at least 90%, e.g., at least 95%, at least 97%, or 100% determined as described in Example 4 of WO2018/098381 (pH optimum).

[0367] In one embodiment, the glucoamylase has a pH stability at pH 5.0 of at least 80%, at least 85%, at least 90% determined as described in Example 4 of WO2018/098381 (pH stability).

[0368] In one embodiment, the glucoamylase, such as a Penicillium oxalicum glucoamylase variant, used in liquefaction has a thermostability determined as DSC Td at pH 4.0 as described in Example 15 of WO2018/098381 of at least 70° C., preferably at least 75° C., such as at least 80° C., such as at least 81° C., such as at least 82° C., such as at least 83° C., such as at least 84° C., such as at least 85° C., such as at least 86° C., such as at least 87%, such as at least 88° C., such as at least 89° C., such as at least 90° C. In one embodiment, the glucoamylase, such as a Penicillium oxalicum glucoamylase variant has a thermostability determined as DSC Td at pH 4.0 as described in Example 15 of WO2018/098381 in the range between 70° C. and 95° C., such as between 80° C. and 90° C.

[0369] In one embodiment, the glucoamylase, such as a Penicillium oxalicum glucoamylase variant, used in liquefaction has a thermostability determined as DSC Td at pH 4.8 as described in Example 15 of WO2018/098381 of at least 70° C., preferably at least 75° C., such as at least 80° C., such as at least 81° C., such as at least 82° C., such as at least 83° C., such as at least 84° C., such as at least 85° C., such as at least 86° C., such as at least 87%, such as at least 88° C., such as at least 89° C., such as at least 90° C., such as at least 91° C. In one embodiment, the glucoamylase, such as a Penicillium oxalicum glucoamylase variant has a thermostability determined as DSC Td at pH 4.8 as described in Example 15 of WO2018/098381 in the range between 70° C. and 95° C., such as between 80° C. and 90° C.

[0370] In one embodiment, the glucoamylase, such as a Penicillium oxalicum glucoamylase variant, used in liquefaction has a residual activity determined as described in Example 16 of WO2018/098381, of at least 100% such as at least 105%, such as at least 110%, such as at least 115%, such as at least 120%, such as at least 125%. In one embodiment, the glucoamylase, such as a Penicillium oxalicum glucoamylase variant has a thermostability determined as residual activity as described in Example 16 of WO2018/098381, in the range between 100% and 130%.

[0371] In one embodiment, the glucoamylase, e.g., of fungal origin such as a filamentous fungi, from a strain of the genus Penicillium, e.g., a strain of Penicillium oxalicum, in particular the Penicillium oxalicum glucoamylase disclosed as SEQ ID NO: 2 in WO2011/127802 (which is hereby incorporated by reference) and shown in SEQ ID NO: 9 or 14 herein.

[0372] In one embodiment, the glucoamylase has at least 80%, e.g., at least 85%, at least 90%, at least 91%, at least 92%, at least 93%, at least 94%, at least 95%, at least 96%, at least 97%, at least 98%, at least 99% or 100% identity to the mature polypeptide shown in SEQ ID NO: 2 in WO2011/127802.

[0373] In one embodiment, the glucoamylase is a variant of the Penicillium oxalicum glucoamylase disclosed as SEQ ID NO: 2 in WO2011/127802 and shown in SEQ ID NO: 9 and 14 herein, having a K79V substitution (using the mature sequence shown in SEQ ID NO: 14 herein for numbering). The K79V glucoamylase variant has reduced sensitivity to protease degradation relative to the parent as disclosed in WO2013/036526 (which is hereby incorporated by reference).

[0374] In one embodiment, the glucoamylase is derived from Penicillium oxalicum.

[0375] In one embodiment, the glucoamylase is a variant of the Penicillium oxalicum glucoamylase disclosed as SEQ ID NO: 2 in WO2011/127802. In one embodiment, the Penicillium oxalicum glucoamylase is the one disclosed as SEQ ID NO: 2 in WO2011/127802 having Val (V) in position 79.

[0376] Contemplated Penicillium oxalicum glucoamylase variants are disclosed in WO2013/053801 which is hereby incorporated by reference.

[0377] In one embodiment, these variants have reduced sensitivity to protease degradation.

[0378] In one embodiment, these variant have improved thermostability compared to the parent.

[0379] In one embodiment, the glucoamylase has a K79V substitution (using SEQ ID NO: 2 of WO2011/127802 for numbering), corresponding to the PE001 variant, and further comprises one of the following alterations or combinations of alterations

[0380] T65A; Q327F; E501V; Y504T; Y504*; T65A+Q327F; T65A+E501V; T65A+Y504T; T65A+Y504*; Q327F+E501V; Q327F+Y504T; Q327F+Y504*; E501V+Y504T; E501V+Y504*; T65A+Q327F+E501V; T65A+Q327F+Y504T; T65A+E501V+Y504T; Q327F+E501V+Y504T; T65A+Q327F+Y504*; T65A+E501V+Y504*; Q327F+E501V+Y504*; T65A+Q327F+E501V+Y504T; T65A+Q327F+E501V+Y504*; E501V+Y504T; T65A+K161S; T65A+Q405T; T65A+Q327W; T65A+Q327F; T65A+Q327Y; P11F+T65A+Q327F; R1K+D3W+K5Q+G7V+N8S+T10K+P11S+T65A+Q327F; P2N+P4S+P11F+T65A+Q327F; P11F+D26C+K33C+T65A+Q327F; P2N+P4S+P11F+T65A+Q327W+E501V+Y504T; R1E+D3N+P4G+G6R+G7A+N8A+T10D+P11D+T65A+Q327F; P11F+T65A+Q327W; P2N+P4S+P11F+T65A+Q327F+E501V+Y504T; P11F+T65A+Q327W+E501V+Y504T; T65A+Q327F+E501V+Y504T; T65A+S105P+Q327W; T65A+S105P+Q327F; T65A+Q327W+S364P; T65A+Q327F+S364P; T65A+S103N+Q327F; P2N+P4S+P11F+K34Y+T65A+Q327F; P2N+P4S+P11F+T65A+Q327F+D445N+V447S; P2N+P4S+P11F+T65A+I172V+Q327F; P2N+P4S+P11F+T65A+Q327F+N502*; P2N+P4S+P11F+T65A+Q327F+N502T+P563S+K571E; P2N+P4S+P11F+R31S+K33V+T65A+Q327F+N564D+K571S; P2N+P4S+P11F+T65A+Q327F+S377T; P2N+P4S+P11F+T65A+V325T+Q327W; P2N+P4S+P11F+T65A+Q327F+D445N+V447S+E501V+Y504T; P2N+P4S+P11F+T65A+I172V+Q327F+E501V+Y504T; P2N+P4S+P11F+T65A+Q327F+S377T+E501V+Y504T; P2N+P4S+P11F+D26N+K34Y+T65A+Q327F; P2N+P4S+P11F+T65A+Q327F+I375A+E501V+Y504T; P2N+P4S+P11F+T65A+K218A+K221D+Q327F+E501V+Y504T; P2N+P4S+P11F+T65A+S103N+Q327F+E501V+Y504T; P2N+P4S+T10D+T65A+Q327F+E501V+Y504T; P2N+P4S+F12Y+T65A+Q327F+E501V+Y504T; K5A+P11F+T65A+Q327F+E501V+Y504T; P2N+P4S+T10E+E18N+T65A+Q327F+E501V+Y504T; P2N+T10E+E18N+T65A+Q327F+E501V+Y504T; P2N+P4S+P11F+T65A+Q327F+E501V+Y504T+T568N; P2N+P4S+P11F+T65A+Q327F+E501V+Y504T+K524T+G526A; P2N+P4S+P11F+K34Y+T65A+Q327F+D445N+V447S+E501V+Y504T; P2N+P4S+P11F+R31S+K33V+T65A+Q327F+D445N+V447S+E501V+Y504T; P2N+P4S+P11F+D26N+K34Y+T65A+Q327F+E501V+Y504T; P2N+P4S+P11F+T65A+F80*+Q327F+E501V+Y504T; P2N+P4S+P11F+T65A+K112S+Q327F+E501V+Y504T; P2N+P4S+P11F+T65A+Q327F+E501V+Y504T+T516P+K524T+G526A; P2N+P4S+P11F+T65A+Q327F+E501V+N502T+Y504*; P2N+P4S+P11F+T65A+Q327F+E501V+Y504T; P2N+P4S+P11F+T65A+S103N+Q327F+E501V+Y504T; K5A+P11F+T65A+Q327F+E501V+Y504T; P2N+P4S+P11F+T65A+Q327F+E501V+Y504T+T516P+K524T+G526A; P2N+P4S+P11F+T65A+V79A+Q327F+E501V+Y504T; P2N+P4S+P11F+T65A+V79G+Q327F+E501V+Y504T; P2N+P4S+P11F+T65A+V791+Q327F+E501V+Y504T; P2N+P4S+P11F+T65A+V79L+Q327F+E501V+Y504T; P2N+P4S+P11F+T65A+V79S+Q327F+E501V+Y504T; P2N+P4S+P11F+T65A+L72V+Q327F+E501V+Y504T; S255N+Q327F+E501V+Y504T; P2N+P4S+P11F+T65A+E74N+V79K+Q327F+E501V+Y504T; P2N+P4S+P11F+T65A+G220N+Q327F+E501V+Y504T; P2N+P4S+P11F+T65A+Y245N+Q327F+E501V+Y504T; P2N+P4S+P11F+T65A+Q253N+Q327F+E501V+Y504T; P2N+P4S+P11F+T65A+D279N+Q327F+E501V+Y504T; P2N+P4S+P11F+T65A+Q327F+S359N+E501V+Y504T; P2N+P4S+P11F+T65A+Q327F+D370N+E501V+Y504T; P2N+P4S+P11F+T65A+Q327F+V460S+E501V+Y504T; P2N+P4S+P11F+T65A+Q327F+V460T+P468T+E501V+Y504T; P2N+P4S+P11F+T65A+Q327F+T463N+E501V+Y504T; P2N+P4S+P11F+T65A+Q327F+S465N+E501V+Y504T; and P2N+P4S+P11F+T65A+Q327F+T477N+E501V+Y504T.

[0381] In one embodiment, the Penicillium oxalicum glucoamylase variant has a K79V substitution (using SEQ ID NO: 2 of WO2011/127802 for numbering), corresponding to the PE001 variant, and further comprises one of the following substitutions or combinations of substitutions:

[0382] P11F+T65A+Q327F;

[0383] P2N+P4S+P11F+T65A+Q327F;

[0384] P11F+D26C+K330+T65A+Q327F;

[0385] P2N+P4S+P11F+T65A+Q327W+E501V+Y504T;

[0386] P2N+P4S+P11F+T65A+Q327F+E501V+Y504T; and

[0387] P11F+T65A+Q327W+E501V+Y504T.

[0388] The glucoamylase may be added in amounts from 0.1-100 micrograms EP/g, such as 0.5-50 micrograms EP/g, such as 1-25 micrograms EP/g, such as 2-12 micrograms EP/g DS.

[0389] Additional polynucleotides encoding suitable glucoamylases may be obtained from microorganisms of any genus, including those readily available within the UniProtKB database (www.uniprot.org).

[0390] The glucoamylase coding sequences can also be used to design nucleic acid probes to identify and clone DNA encoding glucoamylases from strains of different genera or species, as described supra.

[0391] The polynucleotides encoding glucoamylases may also be identified and obtained from other sources including microorganisms isolated from nature (e.g., soil, composts, water, etc.) or DNA samples obtained directly from natural materials (e.g., soil, composts, water, etc,) as described supra.

[0392] Techniques used to isolate or clone polynucleotides encoding glucoamylases are described supra.

[0393] In one embodiment, the glucoamylase has at least 60%, e.g., at least 65%, at least 70%, at least 75%, at least 80%, at least 85%, at least 90%, at least 91%, at least 92%, at least 93%, at least 94%, at least 95%, at least 96%, at least 97%, at least 98%, at least 99%, or 100% sequence identity to any glucoamylase described or referenced herein. In one aspect, the glucoamylase sequence differs by no more than ten amino acids, e.g., by no more than five amino acids, by no more than four amino acids, by no more than three amino acids, by no more than two amino acids, or by one amino acid from any glucoamylase described or referenced herein. In one embodiment, the glucoamylase comprises or consists of the amino acid sequence of any glucoamylase described or referenced herein, allelic variant, or a fragment thereof having glucoamylase activity. In one embodiment, the glucoamylase has an amino acid substitution, deletion, and/or insertion of one or more (e.g., two, several) amino acids. In some embodiments, the total number of amino acid substitutions, deletions and/or insertions is not more than 10, e.g., not more than 9, 8, 7, 6, 5, 4, 3, 2, or 1.

[0394] In some embodiments, the glucoamylase has at least 20%, e.g., at least 40%, at least 50%, at least 60%, at least 70%, at least 80%, at least 90%, at least 95%, at least 96%, at least 97%, at least 98%, at least 99%, or 100% of the glucoamylase activity of any glucoamylase described or referenced herein under the same conditions.

[0395] In one embodiment, the glucoamylase coding sequence hybridizes under at least low stringency conditions, e.g., medium stringency conditions, medium-high stringency conditions, high stringency conditions, or very high stringency conditions with the full-length complementary strand of the coding sequence from any glucoamylase described or referenced herein. In one embodiment, the glucoamylase coding sequence has at least 65%, e.g., at least 70%, at least 75%, at least 80%, at least 85%, at least 85%, at least 90%, at least 91%, at least 92%, at least 93%, at least 94%, at least 95%, at least 96%, at least 97%, at least 98%, at least 99%, or 100% sequence identity with the coding sequence from any glucoamylase described or referenced herein.

[0396] In one embodiment, the polynucleotide encoding the glucoamylase comprises the coding sequence of any glucoamylase described or referenced herein. In one embodiment, the polynucleotide encoding the glucoamylase comprises a subsequence of the coding sequence from any glucoamylase described or referenced herein, wherein the subsequence encodes a polypeptide having glucoamylase activity. In one embodiment, the number of nucleotides residues in the subsequence is at least 75%, e.g., at least 80%, 85%, 90%, or 95% of the number of the referenced coding sequence.

[0397] The glucoamylase can also include fused polypeptides or cleavable fusion polypeptides, as described supra.

### Pullulanases

[0398] In some embodiments, a pullulanase is present and/or added added in the slurry prior to optional jet cook and/or liquefaction, in the liquefaction step and/or saccharification step, or simultaneous saccharification and fermentation (SSF).

[0399] Pullulanases (E.C. 3.2.1.41, pullulan 6-glucano-hydrolase), are debranching enzymes characterized by their ability to hydrolyze the alpha-1,6-glycosidic bonds in, for example, amylopectin and pullulan.

[0400] In some embodiments, the fermenting organism comprises a heterologous polynucleotide encoding a pullulanase. Any pullulanase described or referenced herein is contemplated for expression in the fermenting organism.

[0401] The pullulanase may be any pullulanase that is suitable for the host cells and/or the methods described herein, such as a naturally occurring pullulanase or a variant thereof that retains pullulanase activity.

[0402] In some embodiments, the fermenting organism comprising a heterologous polynucleotide encoding a pullulanase has an increased level of pullulanase activity compared to the host cells without the heterologous polynucleotide encoding the pullulanase, when cultivated under the same conditions. In some embodiments, the fermenting organism has an increased level of pullulanase activity of at least 5%, e.g., at least 10%, at least 15%, at least 20%, at least 25%, at least 50%, at least 100%, at least 150%, at least 200%, at least 300%, or at 500% compared to the fermenting organism without the heterologous polynucleotide encoding the pullulanase, when cultivated under the same conditions.

[0403] Exemplary pullulanasees that can be used with the host cells and/or the methods described herein include bacterial, yeast, or filamentous fungal pullulanases, e.g., obtained from any of the microorganisms described or referenced herein, as described supra.

[0404] Contemplated pullulanases include the pullulanases from Bacillus amyloderamificans disclosed in U.S. Pat. No. 4,560,651 (hereby incorporated by reference), the pullulanase disclosed as SEQ ID NO: 2 in WO 01/151620 (hereby incorporated by reference), the Bacillus deramificans disclosed as SEQ ID NO: 4 in WO 01/151620 (hereby incorporated by reference), and the pullulanase from Bacillus acidopullulyticus disclosed as SEQ ID NO: 6 in WO 01/151620 (hereby incorporated by reference) and also described in FEMS Mic. Let. (1994) 115, 97-106.

[0405] Additional pullulanases contemplated include the pullulanases from Pyrococcus woesei, specifically from Pyrococcus woesei DSM No. 3773 disclosed in WO92/02614.

[0406] In one embodiment, the pullulanase is a family GH57 pullulanase. In one embodiment, the pullulanase includes an X47 domain as disclosed in U.S. Pat. No. 61/289,040 published as WO 2011/087836 (which are hereby incorporated by reference). More specifically the pullulanase may be derived from a strain of the genus Thermococcus, including Thermococcus litoralis and Thermococcus hydrothermalis, such as the Thermococcus hydrothermalis pullulanase truncated at site X4 right after the X47 domain (i.e., amino acids 1-782). The pullulanase may also be a hybrid of the Thermococcus litoralis and Thermococcus hydrothermalis pullulanases or a T. hydrothermalis/T. litoralis hybrid enzyme with truncation site X4 disclosed in U.S. Ser. No. 61/289,040 published as WO 2011/087836 (which is hereby incorporated by reference).

[0407] In another embodiment, the pullulanase is one comprising an X46 domain disclosed in WO 2011/076123 (Novozymes).

[0408] The pullulanase may be added in an effective amount which include the preferred amount of about 0.0001-10 mg enzyme protein per gram DS, preferably 0.0001-0.10 mg enzyme protein per gram DS, more preferably 0.0001-0.010 mg enzyme protein per gram DS. Pullulanase activity may be determined as NPUN. An Assay for determination of NPUN is described in WO2018/098381.

[0409] Suitable commercially available pullulanase products include PROMOZYME D, PROMOZYME™ D2 (Novozymes A/S, Denmark), OPTIMAX L-300 (DuPont-Danisco, USA), and AMANO 8 (Amano, Japan).

[0410] In one embodiment, the pullulanase is derived from the Bacillus subtilis pullulanase of SEQ ID NO: 114 disclosed in PCT/US2018/054212, filed Oct. 3, 2018. In one embodiment, the pullulanase is derived from the Bacillus licheniformis pullulanase of SEQ ID NO: 115 disclosed in PCT/US2018/054212. In one embodiment, the pullulanase is derived from the Oryza sativa pullulanase of SEQ ID NO: 116 disclosed in PCT/US2018/054212. In one embodiment, the pullulanase is derived from the Triticum aestivum pullulanase of SEQ ID NO: 117 disclosed in PCT/US2018/054212. In one embodiment, the pullulanase is derived from the Clostridium phytofermentans pullulanase of SEQ ID NO: 118 disclosed in PCT/US2018/054212. In one embodiment, the pullulanase is derived from the Streptomyces avermitilis pullulanase of SEQ ID NO: 119 disclosed in PCT/US2018/054212. In one embodiment, the pullulanase is derived from the Klebsiella pneumoniae pullulanase of SEQ ID NO: 120 disclosed in PCT/US2018/054212.

[0411] Additional pullulanases contemplated for use with the present invention can be found in WO2011/153516 (the content of which is incorporated herein).

[0412] Additional polynucleotides encoding suitable pullulanases may be obtained from microorganisms of any genus, including those readily available within the UniProtKB database (www.uniprot.org).

[0413] The pullulanase coding sequences can also be used to design nucleic acid probes to identify and clone DNA encoding pullulanases from strains of different genera or species, as described supra.

[0414] The polynucleotides encoding pullulanases may also be identified and obtained from other sources including microorganisms isolated from nature (e.g., soil, composts, water, etc.) or DNA samples obtained directly from natural materials (e.g., soil, composts, water, etc,) as described supra.

[0415] Techniques used to isolate or clone polynucleotides encoding pullulanases are described supra.

[0416] In one embodiment, the pullulanase has at least 60%, e.g., at least 65%, at least 70%, at least 75%, at least 80%, at least 85%, at least 90%, at least 91%, at least 92%, at least 93%, at least 94%, at least 95%, at least 96%, at least 97%, at least 98%, at least 99%, or 100% sequence identity to any pullulanase described or referenced herein. In one aspect, the pullulanase sequence differs by no more than ten amino acids, e.g., by no more than five amino acids, by no more than four amino acids, by no more than three amino acids, by no more than two amino acids, or by one amino acid from any pullulanase described or referenced herein. In one embodiment, the pullulanase comprises or consists of the amino acid sequence of any pullulanase described or referenced herein, allelic variant, or a fragment thereof having pullulanase activity. In one embodiment, the pullulanase has an amino acid substitution, deletion, and/or insertion of one or more (e.g., two, several) amino acids. In some embodiments, the total number of amino acid substitutions, deletions and/or insertions is not more than 10, e.g., not more than 9, 8, 7, 6, 5, 4, 3, 2, or 1.

[0417] In some embodiments, the pullulanase has at least 20%, e.g., at least 40%, at least 50%, at least 60%, at least 70%, at least 80%, at least 90%, at least 95%, at least 96%, at least 97%, at least 98%, at least 99%, or 100% of the pullulanase activity of any pullulanase described or referenced herein under the same conditions.

[0418] In one embodiment, the pullulanase coding sequence hybridizes under at least low stringency conditions, e.g., medium stringency conditions, medium-high stringency conditions, high stringency conditions, or very high stringency conditions with the full-length complementary strand of the coding sequence from any pullulanase described or referenced herein. In one embodiment, the pullulanase coding sequence has at least 65%, e.g., at least 70%, at least 75%, at least 80%, at least 85%, at least 85%, at least 90%, at least 91%, at least 92%, at least 93%, at least 94%, at least 95%, at least 96%, at least 97%, at least 98%, at least 99%, or 100% sequence identity with the coding sequence from any pullulanase described or referenced herein.

[0419] In one embodiment, the polynucleotide encoding the pullulanase comprises the coding sequence of any pullulanase described or referenced herein. In one embodiment, the polynucleotide encoding the pullulanase comprises a subsequence of the coding sequence from any pullulanase described or referenced herein, wherein the subsequence encodes a polypeptide having pullulanase activity. In one embodiment, the number of nucleotides residues in the subsequence is at least 75%, e.g., at least 80%, 85%, 90%, or 95% of the number of the referenced coding sequence.

[0420] The pullulanase can also include fused polypeptides or cleavable fusion polypeptides, as described supra.

### Saccharification and Fermentation of Starch-Containing Material

[0421] In aspects using a starch-containing material, a glucoamylase may be present and/or added in saccharification step a) and/or fermentation step b) or simultaneous saccharification and fermentation (SSF). The glucoamylase of the saccharification step a) and/or fermentation step b) or simultaneous saccharification and fermentation (SSF) is typically different from the glucoamylase optionally added to any liquefaction step described supra. In one embodiment, the glucoamylase is present and/or added together with a fungal alpha-amylase.

[0422] In some aspects, the fermenting organism comprises a heterologous polynucleotide encoding a glucoamylase, for example, as described in WO 2017/087330, the content of which is hereby incorporated by reference.

[0423] Examples of glucoamylases can be found in the “Glucoamylases in Saccharification and/or Fermentation” section below.

[0424] When doing sequential saccharification and fermentation, saccharification step a) may be carried out under conditions well-known in the art. For instance, saccharification step a) may last up to from about 24 to about 72 hours. In one embodiment, pre-saccharification is done. Pre-saccharification is typically done for 40-90 minutes at a temperature between 30-65° C., typically about 60° C. Pre-saccharification is, in one embodiment, followed by saccharification during fermentation in simultaneous saccharification and fermentation (SSF). Saccharification is typically carried out at temperatures from 20-75° C., preferably from 40-70° C., typically about 60° C., and typically at a pH between 4 and 5, such as about pH 4.5.

[0425] Fermentation is carried out in a fermentation medium, as known in the art and, e.g., as described herein. The fermentation medium includes the fermentation substrate, that is, the carbohydrate source that is metabolized by the fermenting organism. With the processes described herein, the fermentation medium may comprise nutrients and growth stimulator(s) for the fermenting organism(s). Nutrient and growth stimulators are widely used in the art of fermentation and include nitrogen sources, such as ammonia; urea, vitamins and minerals, or combinations thereof.

[0426] In some embodiments, the fermenting organism provides (or is capable of providing) an ethanol yield increase over Saccharomyces cerevisiae strain Ethanol Red® (deposited under Accession No. V14/007039 at National Measurement Institute, Victoria, Australia) of more than 1.0%, e.g., more than 2.0%, more than 2.5%, more than 3.0%, more than 3.5%, more than 4.0%, more than 4.5%, more than 5.0%, more than 5.5%, more than 6.0%, more than 6.5%, more than 7.0%, more than 7.5%, more than 8.0%, more than 8.5%, more than 9.0%, more than 9.5%, or more than 10.0%, using the same process set-up and conditions, e.g., conditions described herein. Improved ethanol yields can be measures at about or after 10, 20, 30, 40 50, 60 or 70 hours fermentation.

[0427] In some embodiments, the fermenting organism provides (or is capable of providing) an ethanol yield increase of more than 1.0%, e.g., more than 2.0%, more than 2.5%, more than 3.0%, more than 3.5%, more than 4.0%, more than 4.5%, more than 5.0%, more than 5.5%, more than 6.0%, more than 6.5%, more than 7.0%, more than 7.5%, more than 8.0%, more than 8.5%, more than 9.0%, more than 9.5%, or more than 10.0%, when compared to an otherwise identical fermenting organism lacking the genetic modification that increases or decreases expression of a regulator, when using the same process set-up and conditions, e.g., conditions described herein. Improved ethanol yields can be measures at about or after 10, 20, 30, 40 50, 60 or 70 hours fermentation.

[0428] Generally, fermenting organisms such as yeast, including Saccharomyces cerevisiae yeast, require an adequate source of nitrogen for propagation and fermentation. Many sources of supplemental nitrogen, if necessary, can be used and such sources of nitrogen are well known in the art. The nitrogen source may be organic, such as urea, DDGs, wet cake or corn mash, or inorganic, such as ammonia or ammonium hydroxide. In one embodiment, the nitrogen source is urea.

[0429] In some embodiments, the fermenting organism requires less supplemental nitrogen (e.g., urea, ammonia, ammonium hydroxide) during fermentation to maintain the same or greater yield of fermentation product (e.g., ethanol), when compared to an otherwise identical fermenting organism lacking the genetic modification that increases or decreases expression of a transporter, or regulator thereof. In some embodiments, the fermenting organism requires less than 95%, less than 90%, less than 85%, less than 80%, less than 75%, less than 70%, less than 65%, less than 60%, less than 55%, less than 50%, less than 45%, less than 40%, less than 35%, less than 30%, less than 25%, less than 20%, less than 15%, less than 10%, less than 5%, supplemental nitrogen (e.g., urea, ammonia, ammonium hydroxide) during fermentation to maintain the same yield of fermentation product (e.g., ethanol), when compared to an otherwise identical fermenting organism lacking the genetic modification that increases or decreases expression of a transporter, or regulator thereof. In some embodiments, the fermenting organism requires no supplemental nitrogen (e.g., urea, ammonia, ammonium hydroxide) during fermentation to maintain the same yield of fermentation product (e.g., ethanol), when compared to an otherwise identical fermenting organism lacking the genetic modification that increases or decreases expression of a transporter, or regulator thereof. Fermentaion product yields can be measures at about or after 10, 20, 30, 40 50, 60 or 70 hours fermentation.

[0430] In some embodiments, the fermenting organism efficiently utilizes tripeptides and/or tetrapeptides in the fermentation medium, thereby decreasing the residual concentration following fermentation. Methods of determining amount (e.g., concentration) of tripeptides and tetrapeptides in the fermentation medium are known in the art and described in the examples herein. In some embodiments, the fermenting organism decreases (or is capable of decreasing) the amount of residual tripeptides and/or tetrapeptides in the fermentation medium after 29 hours of fermentation (e.g., under conditions described herein), by at least 5%, e.g., 10%, 15%, 20%, 25%, 30%, 35%, 40%, 45%, 50%, 55%, 60%, 65%, 70%, 75%, 80%, 85%, 90%, or 95%, when compared to an otherwise identical fermenting organism lacking the genetic modification that increases or decreases expression of a transporter, or regulator thereof.

[0431] Simultaneous saccharification and fermentation (“SSF”) is widely used in industrial scale fermentation product production processes, especially ethanol production processes. When doing SSF the saccharification step a) and the fermentation step b) are carried out simultaneously. There is no holding stage for the saccharification, meaning that a fermenting organism, such as yeast, and enzyme(s), may be added together. However, it is also contemplated to add the fermenting organism and enzyme(s) separately. SSF is typically carried out at a temperature from 25° C. to 40° C., such as from 28° C. to 35° C., such as from 30° C. to 34° C., or about 32° C. In one embodiment, fermentation is ongoing for 6 to 120 hours, in particular 24 to 96 hours. In one embodiment, the pH is between 4-5.

[0432] In one embodiment, a cellulolytic enzyme composition is present and/or added in saccharification, fermentation or simultaneous saccharification and fermentation (SSF). Examples of such cellulolytic enzyme compositions can be found in the “Cellulolytic Enzyme Composition” section below. The cellulolytic enzyme composition may be present and/or added together with a glucoamylase, such as one disclosed in the “Glucoamylase in Saccharification and/or Fermentation” section below.

### Glucoamylase in Saccharification and/or Fermentation

[0433] Glucoamylase may be present and/or added in saccharification, fermentation or simultaneous saccharification and fermentation (SSF).

[0434] As described supra, in some embodiments, the fermenting organism comprises a heterologous polynucleotide encoding an glucoamylase, for example, as described in WO2017/087330, the content of which is hereby incorporated by reference. Any glucoamylase described or referenced herein is contemplated for expression in the fermenting organism.

[0435] The glucoamylase may be any glucoamylase that is suitable for the host cells and/or the methods described herein, such as a naturally occurring glucoamylase or a variant thereof that retains glucoamylase activity.

[0436] In some embodiments, the fermenting organism comprising a heterologous polynucleotide encoding a glucoamylase has an increased level of glucoamylase activity compared to the host cells without the heterologous polynucleotide encoding the glucoamylase, when cultivated under the same conditions. In some embodiments, the fermenting organism has an increased level of glucoamylase activity of at least 5%, e.g., at least 10%, at least 15%, at least 20%, at least 25%, at least 50%, at least 100%, at least 150%, at least 200%, at least 300%, or at 500% compared to the fermenting organism without the heterologous polynucleotide encoding the glucoamylase, when cultivated under the same conditions.

[0437] Exemplary glucoamylases that can be used with the host cells and/or the methods described herein include bacterial, yeast, or filamentous fungal glucoamylases, e.g., obtained from any of the microorganisms described or referenced herein, as described supra.

[0438] The glucoamylase may be derived from any suitable source, e.g., derived from a microorganism or a plant. Preferred glucoamylases are of fungal or bacterial origin, selected from the group consisting of Aspergillus glucoamylases, in particular Aspergillus niger G1 or G2 glucoamylase (Boel et al. (1984), EMBO J. 3 (5), p. 1097-1102), or variants thereof, such as those disclosed in WO 92/00381, WO 00/04136 and WO 01/04273 (from Novozymes, Denmark); the A. awamori glucoamylase disclosed in WO 84/02921, Aspergillus oryzae glucoamylase (Agric. Biol. Chem. (1991), 55 (4), p. 941-949), or variants or fragments thereof. Other Aspergillus glucoamylase variants include variants with enhanced thermal stability: G137A and G139A (Chen et al. (1996), Prot. Eng. 9, 499-505); D257E and D293E/Q (Chen et al. (1995), Prot. Eng. 8, 575-582); N182 (Chen et al. (1994), Biochem. J. 301, 275-281); disulphide bonds, A246C (Fierobe et al. (1996), Biochemistry, 35, 8698-8704; and introduction of Pro residues in position A435 and S436 (Li et al. (1997), Protein Eng. 10, 1199-1204.

[0439] Other glucoamylases include Athelia rolfsii (previously denoted Corticium rolfsii) glucoamylase (see U.S. Pat. No. 4,727,026 and (Nagasaka et al. (1998) Purification and properties of the raw-starch-degrading glucoamylases from Corticium rolfsii, Appl Microbiol Biotechnol 50:323-330), Talaromyces glucoamylases, in particular derived from Talaromyces emersonii (WO 99/28448), Talaromyces leycettanus (U.S. Pat. No. Re. 32,153), Talaromyces duponti, Talaromyces thermophilus (U.S. Pat. No. 4,587,215). In one embodiment, the glucoamylase used during saccharification and/or fermentation is the Talaromyces emersonii glucoamylase disclosed in WO 99/28448.

[0440] Bacterial glucoamylases contemplated include glucoamylases from the genus Clostridium, in particular C. thermoamylolyticum (EP 135,138), and C. thermohydrosulfuricum (WO 86/01831).

[0441] Contemplated fungal glucoamylases include Trametes cingulate, Pachykytospora papyracea; and Leucopaxillus giganteus all disclosed in WO 2006/069289; or Peniophora rufomarginata disclosed in WO2007/124285; or a mixture thereof. Also hybrid glucoamylase are contemplated. Examples include the hybrid glucoamylases disclosed in WO2005/045018.

[0442] In one embodiment, the glucoamylase is derived from a strain of the genus Pycnoporus, in particular a strain of Pycnoporus as described in WO2011/066576 (SEQ ID NO: 2, 4 or 6 therein), including the Pycnoporus sanguineus glucoamylase, or from a strain of the genus Gloeophyllum, such as a strain of Gloeophyllum sepiarium or Gloeophyllum trabeum, in particular a strain of Gloeophyllum as described in WO2011/068803 (SEQ ID NO: 2, 4, 6, 8, 10, 12, 14 or 16 therein). In one embodiment, the glucoamylase is SEQ ID NO: 2 in WO2011/068803 (i.e. Gloeophyllum sepiarium glucoamylase).

[0443] In one embodiment, the glucoamylase is a Gloeophyllum trabeum glucoamylase (disclosed as SEQ ID NO: 3 in WO2014/177546). In another embodiment, the glucoamylase is derived from a strain of the genus Nigrofomes, in particular a strain of Nigrofomes sp. disclosed in WO2012/064351 (SEQ ID NO: 2 therein).

[0444] Also contemplated are glucoamylases which exhibit a high identity to any of the above mentioned glucoamylases, i.e., at least 60%, such as at least 70%, at least 75%, at least 80%, at least 85%, at least 90%, at least 95%, at least 96%, at least 97%, at least 98%, at least 99% or even 100% identity to any one of the mature enzyme sequences mentioned above.

[0445] Glucoamylases may be added to the saccharification and/or fermentation in an amount of 0.0001-20 AGU/g DS, preferably 0.001-10 AGU/g DS, especially between 0.01-5 AGU/g DS, such as 0.1-2 AGU/g DS.

[0446] Glucoamylases may be added to the saccharification and/or fermentation in an amount of 1-1,000 μg EP/g DS, preferably 10-500 μg/gDS, especially between 25-250 μg/g DS.

[0447] In one embodiment, the glucoamylase is added as a blend further comprising an alpha-amylase. In one embodiment, the alpha-amylase is a fungal alpha-amylase, especially an acid fungal alpha-amylase. The alpha-amylase is typically a side activity.

[0448] In one embodiment, the glucoamylase is a blend comprising Talaromyces emersonii glucoamylase disclosed in WO 99/28448 as SEQ ID NO: 34 and Trametes cingulata glucoamylase disclosed as SEQ ID NO: 2 in WO 06/069289.

[0449] In one embodiment, the glucoamylase is a blend comprising Talaromyces emersonii glucoamylase disclosed in WO 99/28448 (SEQ ID NO: 19 herein), Trametes cingulata glucoamylase disclosed as SEQ ID NO: 2 in WO 06/69289, and an alpha-amylase.

[0450] In one embodiment, the glucoamylase is a blend comprising Talaromyces emersonii glucoamylase disclosed in WO99/28448, Trametes cingulata glucoamylase disclosed in WO 06/69289, and Rhizomucor pusillus alpha-amylase with Aspergillus niger glucoamylase linker and SBD disclosed as V039 in Table 5 in WO2006/069290.

[0451] In one embodiment, the glucoamylase is a blend comprising Gloeophyllum sepiarium glucoamylase shown as SEQ ID NO: 2 in WO2011/068803 and an alpha-amylase, in particular Rhizomucor pusillus alpha-amylase with an Aspergillus niger glucoamylase linker and starch-binding domain (SBD), disclosed SEQ ID NO: 3 in WO2013/006756, in particular with the following substitutions: G128D+D143N.

[0452] In one embodiment, the alpha-amylase may be derived from a strain of the genus Rhizomucor, preferably a strain the Rhizomucor pusillus, such as the one shown in SEQ ID NO: 3 in WO2013/006756, or the genus Meripilus, preferably a strain of Meripilus giganteus. In one embodiment, the alpha-amylase is derived from a Rhizomucor pusillus with an Aspergillus niger glucoamylase linker and starch-binding domain (SBD), disclosed as V039 in Table 5 in WO2006/069290.

[0453] In one embodiment, the Rhizomucor pusillus alpha-amylase or the Rhizomucor pusillus alpha-amylase with an Aspergillus niger glucoamylase linker and starch-binding domain (SBD) has at least one of the following substitutions or combinations of substitutions: D165M; Y141W; Y141R; K136F; K192R; P224A; P224R; S123H+Y141W; G20S+Y141W; A76G+Y141W; G128D+Y141W; G128D+D143N; P219C+Y141W; N142D+D143N; Y141W+K192R; Y141W+D143N; Y141W+N383R; Y141W+P219C+A265C; Y141W+N142D+D143N; Y141W+K192R V410A; G128D+Y141W+D143N; Y141W+D143N+P219C; Y141W+D143N+K192R; G128D+D143N+K192R; Y141W+D143N+K192R+P219C; and G128D+Y141W+D143N+K192R; or G128D+Y141W+D143N+K192R+P219C (using SEQ ID NO: 3 in WO 2013/006756 for numbering).

[0454] In one embodiment, the glucoamylase blend comprises Gloeophyllum sepiarium glucoamylase (e.g., SEQ ID NO: 2 in WO2011/068803) and Rhizomucor pusillus alpha-amylase.

[0455] In one embodiment, the glucoamylase blend comprises Gloeophyllum sepiarium glucoamylase shown as SEQ ID NO: 2 in WO2011/068803 and Rhizomucor pusillus with an Aspergillus niger glucoamylase linker and starch-binding domain (SBD), disclosed SEQ ID NO: 3 in WO2013/006756 with the following substitutions: G128D+D143N.

[0456] Commercially available compositions comprising glucoamylase include AMG 200L; AMG 300 L; SAN™ SUPER, SAN™ EXTRA L, SPIRIZYME™ PLUS, SPIRIZYME™ FUEL, SPIRIZYME™ B4U, SPIRIZYME™ ULTRA, SPIRIZYME™ EXCEL, SPIRIZYME ACHIEVE™, and AMG™ E (from Novozymes A/S); OPTIDEX™ 300, GC480, GC417 (from DuPont-Danisco); AMIGASE™ and AMIGASE™ PLUS (from DSM); G-ZYME™ G900, G-ZYME™ and G990 ZR (from DuPont-Danisco).

[0457] In one embodiment, the glucoamylase is derived from the Debaryomyces occidentalis glucoamylase shown as SEQ ID NO: 102 in WO2018/222990. In one embodiment, the glucoamylase is derived from the Saccharomycopsis fibuligera glucoamylase shown as SEQ ID NO: 103 of WO2018/222990. In one embodiment, the glucoamylase is derived from the Saccharomycopsis fibuligera glucoamylase shown as SEQ ID NO: 104 of WO2018/222990. In one embodiment, the glucoamylase is derived from the Saccharomyces cerevisiae glucoamylase shown as SEQ ID NO: 105 of WO2018/222990. In one embodiment, the glucoamylase is derived from the Aspergillus niger glucoamylase shown as SEQ ID NO: 106 of WO2018/222990. In one embodiment, the glucoamylase is derived from the Aspergillus oryzae glucoamylase shown as SEQ ID NO: 107 of WO2018/222990. In one embodiment, the glucoamylase is derived from the Rhizopus oryzae glucoamylase shown as SEQ ID NO: 108 of WO2018/222990. In one embodiment, the glucoamylase is derived from the Clostridium thermocellum glucoamylase shown as SEQ ID NO: 109 of WO2018/222990. In one embodiment, the glucoamylase is derived from the Clostridium thermocellum glucoamylase shown as SEQ ID NO: 110 of WO2018/222990. In one embodiment, the glucoamylase is derived from the Arxula adeninivorans glucoamylase shown as SEQ ID NO: 111 of WO2018/222990. In one embodiment, the glucoamylase is derived from the Hormoconis resinae glucoamylase shown as SEQ ID NO: 112 of WO2018/222990. In one embodiment, the glucoamylase is derived from the Aureobasidium pullulans glucoamylase shown as SEQ ID NO: 113 of WO2018/222990.

[0458] Additional glucoamylases contemplated for use with the present invention can be found in WO2011/153516 (the content of which is incorporated herein).

[0459] Additional polynucleotides encoding suitable glucoamylases may be obtained from microorganisms of any genus, including those readily available within the UniProtKB database (www.uniprot.org).

[0460] The glucoamylase coding sequences can also be used to design nucleic acid probes to identify and clone DNA encoding glucoamylases from strains of different genera or species, as described supra.

[0461] The polynucleotides encoding glucoamylases may also be identified and obtained from other sources including microorganisms isolated from nature (e.g., soil, composts, water, etc.) or DNA samples obtained directly from natural materials (e.g., soil, composts, water, etc,) as described supra.

[0462] Techniques used to isolate or clone polynucleotides encoding glucoamylases are described supra.

[0463] In one embodiment, the glucoamylase has at least 60%, e.g., at least 65%, at least 70%, at least 75%, at least 80%, at least 85%, at least 90%, at least 91%, at least 92%, at least 93%, at least 94%, at least 95%, at least 96%, at least 97%, at least 98%, at least 99%, or 100% sequence identity to any glucoamylase described or referenced herein (e.g., the Saccharomycopsis fibuligera glucoamylase shown as SEQ ID NO: 103 or 104 of WO2018/222990). In one aspect, the glucoamylase sequence differs by no more than ten amino acids, e.g., by no more than five amino acids, by no more than four amino acids, by no more than three amino acids, by no more than two amino acids, or by one amino acid from any glucoamylase described or referenced herein (e.g., the Saccharomycopsis fibuligera glucoamylase shown as SEQ ID NO: 103 or 104 of WO2018/222990). In one embodiment, the glucoamylase comprises or consists of the amino acid sequence of any glucoamylase described or referenced herein (e.g., the Saccharomycopsis fibuligera glucoamylase shown as SEQ ID NO: 103 or 104 of WO2018/222990), allelic variant, or a fragment thereof having glucoamylase activity. In one embodiment, the glucoamylase has an amino acid substitution, deletion, and/or insertion of one or more (e.g., two, several) amino acids. In some embodiments, the total number of amino acid substitutions, deletions and/or insertions is not more than 10, e.g., not more than 9, 8, 7, 6, 5, 4, 3, 2, or 1.

[0464] In some embodiments, the glucoamylase has at least 20%, e.g., at least 40%, at least 50%, at least 60%, at least 70%, at least 80%, at least 90%, at least 95%, at least 96%, at least 97%, at least 98%, at least 99%, or 100% of the glucoamylase activity of any glucoamylase described or referenced herein (e.g., the Saccharomycopsis fibuligera glucoamylase shown as SEQ ID NO: 103 or 104 of WO2018/222990) under the same conditions.

[0465] In one embodiment, the glucoamylase coding sequence hybridizes under at least low stringency conditions, e.g., medium stringency conditions, medium-high stringency conditions, high stringency conditions, or very high stringency conditions with the full-length complementary strand of the coding sequence from any glucoamylase described or referenced herein (e.g., the Saccharomycopsis fibuligera glucoamylase shown as SEQ ID NO: 103 or 104 of WO2018/222990). In one embodiment, the glucoamylase coding sequence has at least 65%, e.g., at least 70%, at least 75%, at least 80%, at least 85%, at least 85%, at least 90%, at least 91%, at least 92%, at least 93%, at least 94%, at least 95%, at least 96%, at least 97%, at least 98%, at least 99%, or 100% sequence identity with the coding sequence from any glucoamylase described or referenced herein (e.g., the Saccharomycopsis fibuligera glucoamylase shown as SEQ ID NO: 103 or 104 of WO2018/222990).

[0466] In one embodiment, the polynucleotide encoding the glucoamylase comprises the coding sequence of any glucoamylase described or referenced herein (e.g., the Saccharomycopsis fibuligera glucoamylase shown as SEQ ID NO: 103 or 104 of WO2018/222990). In one embodiment, the polynucleotide encoding the glucoamylase comprises a subsequence of the coding sequence from any glucoamylase described or referenced herein, wherein the subsequence encodes a polypeptide having glucoamylase activity. In one embodiment, the number of nucleotides residues in the subsequence is at least 75%, e.g., at least 80%, 85%, 90%, or 95% of the number of the referenced coding sequence.

[0467] The glucoamylase can also include fused polypeptides or cleavable fusion polypeptides, as described supra.

### Methods Using a Cellulosic-Containing Material

[0468] In some aspects, the methods described herein produce a fermentation product from a cellulosic-containing material. The predominant polysaccharide in the primary cell wall of biomass is cellulose, the second most abundant is hemicellulose, and the third is pectin. The secondary cell wall, produced after the cell has stopped growing, also contains polysaccharides and is strengthened by polymeric lignin covalently cross-linked to hemicellulose. Cellulose is a homopolymer of anhydrocellobiose and thus a linear beta-(1-4)-D-glucan, while hemicelluloses include a variety of compounds, such as xylans, xyloglucans, arabinoxylans, and mannans in complex branched structures with a spectrum of substituents. Although generally polymorphous, cellulose is found in plant tissue primarily as an insoluble crystalline matrix of parallel glucan chains. Hemicelluloses usually hydrogen bond to cellulose, as well as to other hemicelluloses, which help stabilize the cell wall matrix.

[0469] Cellulose is generally found, for example, in the stems, leaves, hulls, husks, and cobs of plants or leaves, branches, and wood of trees. The cellulosic-containing material can be, but is not limited to, agricultural residue, herbaceous material (including energy crops), municipal solid waste, pulp and paper mill residue, waste paper, and wood (including forestry residue) (see, for example, Wiselogel et al., 1995, in Handbook on Bioethanol (Charles E. Wyman, editor), pp. 105-118, Taylor & Francis, Washington D.C.; Wyman, 1994, Bioresource Technology 50: 3-16; Lynd, 1990, Applied Biochemistry and Biotechnology 24/25: 695-719; Mosier et al., 1999, Recent Progress in Bioconversion of Lignocellulosics, in Advances in Biochemical Engineering/Biotechnology, T. Scheper, managing editor, Volume 65, pp. 23-40, Springer-Verlag, New York). It is understood herein that the cellulose may be in the form of lignocellulose, a plant cell wall material containing lignin, cellulose, and hemicellulose in a mixed matrix. In one embodiment, the cellulosic-containing material is any biomass material. In another embodiment, the cellulosic-containing material is lignocellulose, which comprises cellulose, hemicelluloses, and lignin.

[0470] In one embodiment, the cellulosic-containing material is agricultural residue, herbaceous material (including energy crops), municipal solid waste, pulp and paper mill residue, waste paper, or wood (including forestry residue).

[0471] In another embodiment, the cellulosic-containing material is arundo, bagasse, bamboo, corn cob, corn fiber, corn stover, miscanthus, rice straw, switchgrass, or wheat straw.

[0472] In another embodiment, the cellulosic-containing material is aspen, eucalyptus, fir, pine, poplar, spruce, or willow.

[0473] In another embodiment, the cellulosic-containing material is algal cellulose, bacterial cellulose, cotton linter, filter paper, microcrystalline cellulose (e.g., AVICEL®), or phosphoric-acid treated cellulose.

[0474] In another embodiment, the cellulosic-containing material is an aquatic biomass. As used herein the term “aquatic biomass” means biomass produced in an aquatic environment by a photosynthesis process. The aquatic biomass can be algae, emergent plants, floating-leaf plants, or submerged plants.

[0475] The cellulosic-containing material may be used as is or may be subjected to pretreatment, using conventional methods known in the art, as described herein. In a preferred embodiment, the cellulosic-containing material is pretreated.

[0476] The methods of using cellulosic-containing material can be accomplished using methods conventional in the art. Moreover, the methods of can be implemented using any conventional biomass processing apparatus configured to carry out the processes.

### Cellulosic Pretreatment

[0477] In one embodiment the cellulosic-containing material is pretreated before saccharification in step (a).

[0478] In practicing the processes described herein, any pretreatment process known in the art can be used to disrupt plant cell wall components of the cellulosic-containing material (Chandra et al., 2007, Adv. Biochem. Engin./Biotechnol. 108: 67-93; Galbe and Zacchi, 2007, Adv. Biochem. Engin./Biotechnol. 108: 41-65; Hendriks and Zeeman, 2009, Bioresource Technology 100: 10-18; Mosier et al., 2005, Bioresource Technology 96: 673-686; Taherzadeh and Karimi, 2008, Int. J. Mol. Sci. 9: 1621-1651; Yang and Wyman, 2008, Biofuels Bioproducts and Biorefining-Biofpr. 2: 26-40).

[0479] The cellulosic-containing material can also be subjected to particle size reduction, sieving, pre-soaking, wetting, washing, and/or conditioning prior to pretreatment using methods known in the art.

[0480] Conventional pretreatments include, but are not limited to, steam pretreatment (with or without explosion), dilute acid pretreatment, hot water pretreatment, alkaline pretreatment, lime pretreatment, wet oxidation, wet explosion, ammonia fiber explosion, organosolv pretreatment, and biological pretreatment. Additional pretreatments include ammonia percolation, ultrasound, electroporation, microwave, supercritical CO₂, supercritical H₂O, ozone, ionic liquid, and gamma irradiation pretreatments.

[0481] In a one embodiment, the cellulosic-containing material is pretreated before saccharification (i.e., hydrolysis) and/or fermentation. Pretreatment is preferably performed prior to the hydrolysis. Alternatively, the pretreatment can be carried out simultaneously with enzyme hydrolysis to release fermentable sugars, such as glucose, xylose, and/or cellobiose. In most cases the pretreatment step itself results in some conversion of biomass to fermentable sugars (even in absence of enzymes).

[0482] In one embodiment, the cellulosic-containing material is pretreated with steam. In steam pretreatment, the cellulosic-containing material is heated to disrupt the plant cell wall components, including lignin, hemicellulose, and cellulose to make the cellulose and other fractions, e.g., hemicellulose, accessible to enzymes. The cellulosic-containing material is passed to or through a reaction vessel where steam is injected to increase the temperature to the required temperature and pressure and is retained therein for the desired reaction time. Steam pretreatment is preferably performed at 140-250° C., e.g., 160-200° C. or 170-190° C., where the optimal temperature range depends on optional addition of a chemical catalyst. Residence time for the steam pretreatment is preferably 1-60 minutes, e.g., 1-30 minutes, 1-20 minutes, 3-12 minutes, or 4-10 minutes, where the optimal residence time depends on the temperature and optional addition of a chemical catalyst. Steam pretreatment allows for relatively high solids loadings, so that the cellulosic-containing material is generally only moist during the pretreatment. The steam pretreatment is often combined with an explosive discharge of the material after the pretreatment, which is known as steam explosion, that is, rapid flashing to atmospheric pressure and turbulent flow of the material to increase the accessible surface area by fragmentation (Duff and Murray, 1996, Bioresource Technology 855: 1-33; Galbe and Zacchi, 2002, Appl. Microbiol. Biotechnol. 59: 618-628; U.S. patent application Ser. No. 2002/0164730). During steam pretreatment, hemicellulose acetyl groups are cleaved and the resulting acid autocatalyzes partial hydrolysis of the hemicellulose to monosaccharides and oligosaccharides. Lignin is removed to only a limited extent.

[0483] In one embodiment, the cellulosic-containing material is subjected to a chemical pretreatment. The term “chemical treatment” refers to any chemical pretreatment that promotes the separation and/or release of cellulose, hemicellulose, and/or lignin. Such a pretreatment can convert crystalline cellulose to amorphous cellulose. Examples of suitable chemical pretreatment processes include, for example, dilute acid pretreatment, lime pretreatment, wet oxidation, ammonia fiber/freeze expansion (AFEX), ammonia percolation (APR), ionic liquid, and organosolv pretreatments.

[0484] A chemical catalyst such as H₂SO₄ or SO₂ (typically 0.3 to 5% w/w) is sometimes added prior to steam pretreatment, which decreases the time and temperature, increases the recovery, and improves enzymatic hydrolysis (Ballesteros et al., 2006, Appl. Biochem. Biotechnol. 129-132: 496-508; Varga et al., 2004, Appl. Biochem. Biotechnol. 113-116: 509-523; Sassner et al., 2006, Enzyme Microb. Technol. 39: 756-762). In dilute acid pretreatment, the cellulosic-containing material is mixed with dilute acid, typically H₂SO₄, and water to form a slurry, heated by steam to the desired temperature, and after a residence time flashed to atmospheric pressure. The dilute acid pretreatment can be performed with a number of reactor designs, e.g., plug-flow reactors, counter-current reactors, or continuous counter-current shrinking bed reactors (Duff and Murray, 1996, Bioresource Technology 855: 1-33; Schell et al., 2004, Bioresource Technology 91: 179-188; Lee et al., 1999, Adv. Biochem. Eng. Biotechnol. 65: 93-115). In a specific embodiment the dilute acid pretreatment of cellulosic-containing material is carried out using 4% w/w sulfuric acid at 180° C. for 5 minutes.

[0485] Several methods of pretreatment under alkaline conditions can also be used. These alkaline pretreatments include, but are not limited to, sodium hydroxide, lime, wet oxidation, ammonia percolation (APR), and ammonia fiber/freeze expansion (AFEX) pretreatment. Lime pretreatment is performed with calcium oxide or calcium hydroxide at temperatures of 85-150° C. and residence times from one hour to several days (Wyman et al., 2005, Bioresource Technology 96: 1959-1966; Mosier et al., 2005, Bioresource Technology 96: 673-686). WO 2006/110891, WO 2006/110899, WO 2006/110900, and WO 2006/110901 disclose pretreatment methods using ammonia.

[0486] Wet oxidation is a thermal pretreatment performed typically at 180-200° C. for 5-15 minutes with addition of an oxidative agent such as hydrogen peroxide or over-pressure of oxygen (Schmidt and Thomsen, 1998, Bioresource Technology 64: 139-151; Palonen et al., 2004, Appl. Biochem. Biotechnol. 117: 1-17; Varga et al., 2004, Biotechnol. Bioeng. 88: 567-574; Martin et al., 2006, J. Chem. Technol. Biotechnol. 81: 1669-1677). The pretreatment is performed preferably at 1-40% dry matter, e.g., 2-30% dry matter or 5-20% dry matter, and often the initial pH is increased by the addition of alkali such as sodium carbonate.

[0487] A modification of the wet oxidation pretreatment method, known as wet explosion (combination of wet oxidation and steam explosion) can handle dry matter up to 30%. In wet explosion, the oxidizing agent is introduced during pretreatment after a certain residence time. The pretreatment is then ended by flashing to atmospheric pressure (WO2006/032282).

[0488] Ammonia fiber expansion (AFEX) involves treating the cellulosic-containing material with liquid or gaseous ammonia at moderate temperatures such as 90-150° C. and high pressure such as 17-20 bar for 5-10 minutes, where the dry matter content can be as high as 60% (Gollapalli et al., 2002, Appl. Biochem. Biotechnol. 98: 23-35; Chundawat et al., 2007, Biotechnol. Bioeng. 96: 219-231; Alizadeh et al., 2005, Appl. Biochem. Biotechnol. 121: 1133-1141; Teymouri et al., 2005, Bioresource Technology 96: 2014-2018). During AFEX pretreatment cellulose and hemicelluloses remain relatively intact. Lignin-carbohydrate complexes are cleaved.

[0489] Organosolv pretreatment delignifies the cellulosic-containing material by extraction using aqueous ethanol (40-60% ethanol) at 160-200° C. for 30-60 minutes (Pan et al., 2005, Biotechnol. Bioeng. 90: 473-481; Pan et al., 2006, Biotechnol. Bioeng. 94: 851-861; Kurabi et al., 2005, Appl. Biochem. Biotechnol. 121: 219-230). Sulphuric acid is usually added as a catalyst. In organosolv pretreatment, the majority of hemicellulose and lignin is removed.

[0490] Other examples of suitable pretreatment methods are described by Schell et al., 2003, Appl. Biochem. Biotechnol. 105-108: 69-85, and Mosier et al., 2005, Bioresource Technology 96: 673-686, and U.S. Published Application 2002/0164730.

[0491] In one embodiment, the chemical pretreatment is carried out as a dilute acid treatment, and more preferably as a continuous dilute acid treatment. The acid is typically sulfuric acid, but other acids can also be used, such as acetic acid, citric acid, nitric acid, phosphoric acid, tartaric acid, succinic acid, hydrogen chloride, or mixtures thereof. Mild acid treatment is conducted in the pH range of preferably 1-5, e.g., 1-4 or 1-2.5. In one aspect, the acid concentration is in the range from preferably 0.01 to 10 wt. % acid, e.g., 0.05 to 5 wt. % acid or 0.1 to 2 wt. % acid. The acid is contacted with the cellulosic-containing material and held at a temperature in the range of preferably 140-200° C., e.g., 165-190° C., for periods ranging from 1 to 60 minutes.

[0492] In another embodiment, pretreatment takes place in an aqueous slurry. In preferred aspects, the cellulosic-containing material is present during pretreatment in amounts preferably between 10-80 wt. %, e.g., 20-70 wt. % or 30-60 wt. %, such as around 40 wt. %. The pretreated cellulosic-containing material can be unwashed or washed using any method known in the art, e.g., washed with water.

[0493] In one embodiment, the cellulosic-containing material is subjected to mechanical or physical pretreatment. The term “mechanical pretreatment” or “physical pretreatment” refers to any pretreatment that promotes size reduction of particles. For example, such pretreatment can involve various types of grinding or milling (e.g., dry milling, wet milling, or vibratory ball milling).

[0494] The cellulosic-containing material can be pretreated both physically (mechanically) and chemically. Mechanical or physical pretreatment can be coupled with steaming/steam explosion, hydrothermolysis, dilute or mild acid treatment, high temperature, high pressure treatment, irradiation (e.g., microwave irradiation), or combinations thereof. In one aspect, high pressure means pressure in the range of preferably about 100 to about 400 psi, e.g., about 150 to about 250 psi. In another aspect, high temperature means temperature in the range of about 100 to about 300° C., e.g., about 140 to about 200° C. In a preferred aspect, mechanical or physical pretreatment is performed in a batch-process using a steam gun hydrolyzer system that uses high pressure and high temperature as defined above, e.g., a Sunds Hydrolyzer available from Sunds Defibrator AB, Sweden. The physical and chemical pretreatments can be carried out sequentially or simultaneously, as desired.

[0495] Accordingly, in one embodiment, the cellulosic-containing material is subjected to physical (mechanical) or chemical pretreatment, or any combination thereof, to promote the separation and/or release of cellulose, hemicellulose, and/or lignin.

[0496] In one embodiment, the cellulosic-containing material is subjected to a biological pretreatment. The term “biological pretreatment” refers to any biological pretreatment that promotes the separation and/or release of cellulose, hemicellulose, and/or lignin from the cellulosic-containing material. Biological pretreatment techniques can involve applying lignin-solubilizing microorganisms and/or enzymes (see, for example, Hsu, T.-A., 1996, Pretreatment of biomass, in Handbook on Bioethanol: Production and Utilization, Wyman, C. E., ed., Taylor & Francis, Washington, DC, 179-212; Ghosh and Singh, 1993, Adv. Appl. Microbiol. 39: 295-333; McMillan, J. D., 1994, Pretreating lignocellulosic biomass: a review, in Enzymatic Conversion of Biomass for Fuels Production, Himmel, M. E., Baker, J. O., and Overend, R. P., eds., ACS Symposium Series 566, American Chemical Society, Washington, DC, chapter 15; Gong, C. S., Cao, N. J., Du, J., and Tsao, G. T., 1999, Ethanol production from renewable resources, in Advances in Biochemical Engineering/Biotechnology, Scheper, T., ed., Springer-Verlag Berlin Heidelberg, Germany, 65: 207-241; Olsson and Hahn-Hagerdal, 1996, Enz. Microb. Tech. 18: 312-331; and Vallander and Eriksson, 1990, Adv. Biochem. Eng./Biotechnol. 42: 63-95).

### Saccharification and Fermentation of Cellulosic-Containing Material

[0497] Saccharification (i.e., hydrolysis) and fermentation, separate or simultaneous, include, but are not limited to, separate hydrolysis and fermentation (SHF); simultaneous saccharification and fermentation (SSF); simultaneous saccharification and co-fermentation (SSCF); hybrid hydrolysis and fermentation (HHF); separate hydrolysis and co-fermentation (SHCF); hybrid hydrolysis and co-fermentation (HHCF).

[0498] SHF uses separate process steps to first enzymatically hydrolyze the cellulosic-containing material to fermentable sugars, e.g., glucose, cellobiose, and pentose monomers, and then ferment the fermentable sugars to ethanol. In SSF, the enzymatic hydrolysis of the cellulosic-containing material and the fermentation of sugars to ethanol are combined in one step (Philippidis, G. P., 1996, Cellulose bioconversion technology, in Handbook on Bioethanol: Production and Utilization, Wyman, C. E., ed., Taylor & Francis, Washington, DC, 179-212). SSCF involves the co-fermentation of multiple sugars (Sheehan and Himmel, 1999, Biotechnol. Prog. 15: 817-827). HHF involves a separate hydrolysis step, and in addition a simultaneous saccharification and hydrolysis step, which can be carried out in the same reactor. The steps in an HHF process can be carried out at different temperatures, i.e., high temperature enzymatic saccharification followed by SSF at a lower temperature that the fermentation organismcan tolerate. It is understood herein that any method known in the art comprising pretreatment, enzymatic hydrolysis (saccharification), fermentation, or a combination thereof, can be used in the practicing the processes described herein.

[0499] A conventional apparatus can include a fed-batch stirred reactor, a batch stirred reactor, a continuous flow stirred reactor with ultrafiltration, and/or a continuous plug-flow column reactor (de Castilhos Corazza et al., 2003, Acta Scientiarum. Technology 25: 33-38; Gusakov and Sinitsyn, 1985, Enz. Microb. Technol. 7: 346-352), an attrition reactor (Ryu and Lee, 1983, Biotechnol. Bioeng. 25: 53-65). Additional reactor types include fluidized bed, upflow blanket, immobilized, and extruder type reactors for hydrolysis and/or fermentation.

[0500] In the saccharification step (i.e., hydrolysis step), the cellulosic and/or starch-containing material, e.g., pretreated, is hydrolyzed to break down cellulose, hemicellulose, and/or starch to fermentable sugars, such as glucose, cellobiose, xylose, xylulose, arabinose, mannose, galactose, and/or soluble oligosaccharides. The hydrolysis is performed enzymatically e.g., by a cellulolytic enzyme composition. The enzymes of the compositions can be added simultaneously or sequentially.

[0501] Enzymatic hydrolysis may be carried out in a suitable aqueous environment under conditions that can be readily determined by one skilled in the art. In one aspect, hydrolysis is performed under conditions suitable for the activity of the enzymes(s), i.e., optimal for the enzyme(s). The hydrolysis can be carried out as a fed batch or continuous process where the cellulosic and/or starch-containing material is fed gradually to, for example, an enzyme containing hydrolysis solution.

[0502] The saccharification is generally performed in stirred-tank reactors or fermentors under controlled pH, temperature, and mixing conditions. Suitable process time, temperature and pH conditions can readily be determined by one skilled in the art. For example, the saccharification can last up to 200 hours, but is typically performed for preferably about 12 to about 120 hours, e.g., about 16 to about 72 hours or about 24 to about 48 hours. The temperature is in the range of preferably about 25° C. to about 70° C., e.g., about 30° C. to about 65° C., about 40° C. to about 60° C., or about 50° C. to about 55° C. The pH is in the range of preferably about 3 to about 8, e.g., about 3.5 to about 7, about 4 to about 6, or about 4.5 to about 5.5. The dry solids content is in the range of preferably about 5 to about 50 wt. %, e.g., about 10 to about 40 wt. % or about 20 to about 30 wt. %.

[0503] Saccharification in step (a) may be carried out using a cellulolytic enzyme composition. Such enzyme compositions are described below in the “Cellulolytic Enzyme Composition” section below. The cellulolytic enzyme compositions can comprise any protein useful in degrading the cellulosic-containing material. In one aspect, the cellulolytic enzyme composition comprises or further comprises one or more (e.g., two, several) proteins selected from the group consisting of a cellulase, an AA9 (GH61) polypeptide, a hemicellulase, an esterase, an expansin, a ligninolytic enzyme, an oxidoreductase, a pectinase, a protease, and a swollenin.

[0504] In another embodiment, the cellulase is preferably one or more (e.g., two, several) enzymes selected from the group consisting of an endoglucanase, a cellobiohydrolase, and a beta-glucosidase.

[0505] In another embodiment, the hemicellulase is preferably one or more (e.g., two, several) enzymes selected from the group consisting of an acetylmannan esterase, an acetylxylan esterase, an arabinanase, an arabinofuranosidase, a coumaric acid esterase, a feruloyl esterase, a galactosidase, a glucuronidase, a glucuronoyl esterase, a mannanase, a mannosidase, a xylanase, and a xylosidase. In another embodiment, the oxidoreductase is one or more (e.g., two, several) enzymes selected from the group consisting of a catalase, a laccase, and a peroxidase.

[0506] The enzymes or enzyme compositions used in a processes of the present invention may be in any form suitable for use, such as, for example, a fermentation broth formulation or a cell composition, a cell lysate with or without cellular debris, a semi-purified or purified enzyme preparation, or a host cell as a source of the enzymes. The enzyme composition may be a dry powder or granulate, a non-dusting granulate, a liquid, a stabilized liquid, or a stabilized protected enzyme. Liquid enzyme preparations may, for instance, be stabilized by adding stabilizers such as a sugar, a sugar alcohol or another polyol, and/or lactic acid or another organic acid according to established processes.

[0507] In one embodiment, an effective amount of cellulolytic or hemicellulolytic enzyme composition to the cellulosic-containing material is about 0.5 to about 50 mg, e.g., about 0.5 to about 40 mg, about 0.5 to about 25 mg, about 0.75 to about 20 mg, about 0.75 to about 15 mg, about 0.5 to about 10 mg, or about 2.5 to about 10 mg per g of the cellulosic-containing material.

[0508] In one embodiment, such a compound is added at a molar ratio of the compound to glucosyl units of cellulose of about 10⁻⁶ to about 10, e.g., about 10⁻⁶ to about 7.5, about 10⁻⁶ to about 5, about 10⁻⁶ to about 2.5, about 10⁻⁶ to about 1, about 10⁻⁵ to about 1, about 10⁻⁵ to about 10⁻¹, about 10⁻⁴ to about 10⁻¹, about 10⁻³ to about 10⁻¹, or about 10⁻³ to about 10⁻². In another aspect, an effective amount of such a compound is about 0.1 μM to about 1 M, e.g., about 0.5 μM to about 0.75 M, about 0.75 μM to about 0.5 M, about 1 μM to about 0.25 M, about 1 μM to about 0.1 M, about 5 μM to about 50 mM, about 10 μM to about 25 mM, about 50 μM to about 25 mM, about 10 μM to about 10 mM, about 5 μM to about 5 mM, or about 0.1 mM to about 1 mM.

[0509] The term “liquor” means the solution phase, either aqueous, organic, or a combination thereof, arising from treatment of a lignocellulose and/or hemicellulose material in a slurry, or monosaccharides thereof, e.g., xylose, arabinose, mannose, etc., under conditions as described in WO 2012/021401, and the soluble contents thereof. A liquor for cellulolytic enhancement of an AA9 polypeptide (GH61 polypeptide) can be produced by treating a lignocellulose or hemicellulose material (or feedstock) by applying heat and/or pressure, optionally in the presence of a catalyst, e.g., acid, optionally in the presence of an organic solvent, and optionally in combination with physical disruption of the material, and then separating the solution from the residual solids. Such conditions determine the degree of cellulolytic enhancement obtainable through the combination of liquor and an AA9 polypeptide during hydrolysis of a cellulosic substrate by a cellulolytic enzyme preparation. The liquor can be separated from the treated material using a method standard in the art, such as filtration, sedimentation, or centrifugation.

[0510] In one embodiment, an effective amount of the liquor to cellulose is about 10⁻⁶ to about 10 g per g of cellulose, e.g., about 10⁻⁶ to about 7.5 g, about 10⁻⁶ to about 5 g, about 10⁻⁶ to about 2.5 g, about 10⁻⁶ to about 1 g, about 10⁻⁵ to about 1 g, about 10⁻⁵ to about 10⁻¹ g, about 10⁻⁴ to about 10⁻¹ g, about 10⁻³ to about 10⁻¹ g, or about 10⁻³ to about 10⁻² g per g of cellulose.

[0511] In the fermentation step, sugars, released from the cellulosic-containing material, e.g., as a result of the pretreatment and enzymatic hydrolysis steps, are fermented to ethanol, by a fermenting organism, such as yeast described herein. Hydrolysis (saccharification) and fermentation can be separate or simultaneous.

[0512] Any suitable hydrolyzed cellulosic-containing material can be used in the fermentation step in practicing the processes described herein. Such feedstocks include, but are not limited to carbohydrates (e.g., lignocellulose, xylans, cellulose, starch, etc.). The material is generally selected based on economics, i.e., costs per equivalent sugar potential, and recalcitrance to enzymatic conversion.

[0513] Production of ethanol by a fermenting organism using cellulosic-containing material results from the metabolism of sugars (monosaccharides). The sugar composition of the hydrolyzed cellulosic-containing material and the ability of the fermenting organism to utilize the different sugars has a direct impact in process yields.

[0514] Compositions of the fermentation media and fermentation conditions depend on the fermenting organism and can easily be determined by one skilled in the art. Typically, the fermentation takes place under conditions known to be suitable for generating the fermentation product. In some embodiments, the fermentation process is carried out under aerobic or microaerophilic (i.e., where the concentration of oxygen is less than that in air), or anaerobic conditions. In some embodiments, fermentation is conducted under anaerobic conditions (i.e., no detectable oxygen), or less than about 5, about 2.5, or about 1 mmol/L/h oxygen. In the absence of oxygen, the NADH produced in glycolysis cannot be oxidized by oxidative phosphorylation. Under anaerobic conditions, pyruvate or a derivative thereof may be utilized by the host cell as an electron and hydrogen acceptor in order to generate NAD+.

[0515] The fermentation process is typically run at a temperature that is optimal for the recombinant fungal cell. For example, in some embodiments, the fermentation process is performed at a temperature in the range of from about 25° C. to about 42° C. Typically the process is carried out a temperature that is less than about 38° C., less than about 35° C., less than about 33° C., or less than about 38° C., but at least about 20° C., 22° C., or 25° C.

[0516] A fermentation stimulator can be used in a process described herein to further improve the fermentation, and in particular, the performance of the fermenting organism, such as, rate enhancement and product yield (e.g., ethanol yield). A “fermentation stimulator” refers to stimulators for growth of the fermenting organisms, in particular, yeast. Preferred fermentation stimulators for growth include vitamins and minerals. Examples of vitamins include multivitamins, biotin, pantothenate, nicotinic acid, meso-inositol, thiamine, pyridoxine, para-aminobenzoic acid, folic acid, riboflavin, and Vitamins A, B, C, D, and E. See, for example, Alfenore et al., Improving ethanol production and viability of Saccharomyces cerevisiae by a vitamin feeding strategy during fed-batch process, Springer-Verlag (2002), which is hereby incorporated by reference. Examples of minerals include minerals and mineral salts that can supply nutrients comprising P, K, Mg, S, Ca, Fe, Zn, Mn, and Cu.

### Cellulolytic Enzymes and Compositions

[0517] A cellulolytic enzyme or cellulolytic enzyme composition may be present and/or added during saccharification in step (a). A cellulolytic enzyme composition is an enzyme preparation containing one or more (e.g., two, several) enzymes that hydrolyze cellulosic-containing material. Such enzymes include endoglucanase, cellobiohydrolase, beta-glucosidase, and/or combinations thereof.

[0518] In some embodiments, the fermenting organism comprises one or more (e.g., two, several) heterologous polynucleotides encoding enzymes that hydrolyze cellulosic-containing material (e.g., an endoglucanase, cellobiohydrolase, beta-glucosidase or combinations thereof). Any enzyme described or referenced herein that hydrolyzes cellulosic-containing material is contemplated for expression in the fermenting organism.

[0519] The cellulolytic enzyme may be any cellulolytic enzyme that is suitable for the host cells and/or the methods described herein (e.g., an endoglucanase, cellobiohydrolase, beta-glucosidase), such as a naturally occurring cellulolytic enzyme or a variant thereof that retains cellulolytic enzyme activity.

[0520] In some embodiments, the fermenting organism comprising a heterologous polynucleotide encoding a cellulolytic enzyme has an increased level of cellulolytic enzyme activity (e.g., increased endoglucanase, cellobiohydrolase, and/or beta-glucosidase) compared to the host cells without the heterologous polynucleotide encoding the cellulolytic enzyme, when cultivated under the same conditions. In some embodiments, the fermenting organism has an increased level of cellulolytic enzyme activity of at least 5%, e.g., at least 10%, at least 15%, at least 20%, at least 25%, at least 50%, at least 100%, at least 150%, at least 200%, at least 300%, or at 500% compared to the fermenting organism without the heterologous polynucleotide encoding the cellulolytic enzyme, when cultivated under the same conditions.

[0521] Exemplary cellulolytic enzymes that can be used with the host cells and/or the methods described herein include bacterial, yeast, or filamentous fungal cellulolytic enzymes, e.g., obtained from any of the microorganisms described or referenced herein, as described supra.

[0522] The cellulolytic enzyme may be of any origin. In an embodiment the cellulolytic enzyme is derived from a strain of Trichoderma, such as a strain of Trichoderma reesei; a strain of Humicola, such as a strain of Humicola insolens, and/or a strain of Chrysosporium, such as a strain of Chrysosporium lucknowense. In a preferred embodiment the cellulolytic enzyme is derived from a strain of Trichoderma reesei.

[0523] The cellulolytic enzyme composition may further comprise one or more of the following polypeptides, such as enzymes: AA9 polypeptide (GH61 polypeptide) having cellulolytic enhancing activity, beta-glucosidase, xylanase, beta-xylosidase, CBH I, CBH II, or a mixture of two, three, four, five or six thereof.

[0524] The further polypeptide(s) (e.g., AA9 polypeptide) and/or enzyme(s) (e.g., beta-glucosidase, xylanase, beta-xylosidase, CBH I and/or CBH II may be foreign to the cellulolytic enzyme composition producing organism (e.g., Trichoderma reesei).

[0525] In an embodiment, the cellulolytic enzyme composition comprises an AA9 polypeptide having cellulolytic enhancing activity and a beta-glucosidase.

[0526] In another embodiment, the cellulolytic enzyme composition comprises an AA9 polypeptide having cellulolytic enhancing activity, a beta-glucosidase, and a CBH I.

[0527] In another embodiment, the cellulolytic enzyme composition comprises an AA9 polypeptide having cellulolytic enhancing activity, a beta-glucosidase, a CBH I and a CBH II.

[0528] Other enzymes, such as endoglucanases, may also be comprised in the cellulolytic enzyme composition.

[0529] As mentioned above, the cellulolytic enzyme composition may comprise a number of difference polypeptides, including enzymes.

[0530] In one embodiment, the cellulolytic enzyme composition is a Trichoderma reesei cellulolytic enzyme composition, further comprising Thermoascus aurantiacus AA9 (GH61A) polypeptide having cellulolytic enhancing activity (e.g., WO2005/074656), and Aspergillus oryzae beta-glucosidase fusion protein (e.g., one disclosed in WO2008/057637, in particular shown as SEQ ID NOs: 59 and 60 therein).

[0531] In another embodiment, the cellulolytic enzyme composition is a Trichoderma reesei cellulolytic enzyme composition, further comprising Thermoascus aurantiacus AA9 (GH61A) polypeptide having cellulolytic enhancing activity (e.g., SEQ ID NO: 2 in WO2005/074656), and Aspergillus fumigatus beta-glucosidase (e.g., SEQ ID NO: 2 of WO2005/047499).

[0532] In another embodiment, the cellulolytic enzyme composition is a Trichoderma reesei cellulolytic enzyme composition, further comprising Penicillium emersonii AA9 (GH61A) polypeptide having cellulolytic enhancing activity, in particular the one disclosed in WO2011/041397, and Aspergillus fumigatus beta-glucosidase (e.g., SEQ ID NO: 2 of WO2005/047499).

[0533] In another embodiment, the cellulolytic enzyme composition is a Trichoderma reesei cellulolytic enzyme composition, further comprising Penicillium emersonii AA9 (GH61A) polypeptide having cellulolytic enhancing activity, in particular the one disclosed in WO2011/041397, and Aspergillus fumigatus beta-glucosidase (e.g., SEQ ID NO: 2 of WO2005/047499) or a variant disclosed in WO 2012/044915 (hereby incorporated by reference), in particular one comprising one or more such as all of the following substitutions: F100D, S283G, N456E, F512Y.

[0534] In an embodiment, the cellulolytic enzyme composition is a Trichoderma reesei cellulolytic composition, further comprising an AA9 (GH61A) polypeptide having cellulolytic enhancing activity, in particular the one derived from a strain of Penicillium emersonii (e.g., SEQ ID NO: 2 in WO2011/041397), Aspergillus fumigatus beta-glucosidase (e.g., SEQ ID NO: 2 in WO2005/047499) variant with one or more, in particular all of the following substitutions: F100D, S283G, N456E, F512Y and disclosed in WO2012/044915; Aspergillus fumigatus Cel7A CBH1, e.g., the one disclosed as SEQ ID NO: 6 in WO2011/057140 and Aspergillus fumigatus CBH II, e.g., the one disclosed as SEQ ID NO: 18 in WO2011/057140.

[0535] In one embodiment, the cellulolytic enzyme composition is a Trichoderma reesei, cellulolytic enzyme composition, further comprising a hemicellulase or hemicellulolytic enzyme composition, such as an Aspergillus fumigatus xylanase and Aspergillus fumigatus beta-xylosidase.

[0536] In one embodiment, the cellulolytic enzyme composition also comprises a xylanase (e.g., derived from a strain of the genus Aspergillus, in particular Aspergillus aculeatus or Aspergillus fumigatus; or a strain of the genus Talaromyces, in particular Talaromyces leycettanus) and/or a beta-xylosidase (e.g., derived from Aspergillus, in particular Aspergillus fumigatus, or a strain of Talaromyces, in particular Talaromyces emersonii).

[0537] In an embodiment, the cellulolytic enzyme composition is a Trichoderma reesei cellulolytic enzyme composition, further comprising Thermoascus aurantiacus AA9 (GH61A) polypeptide having cellulolytic enhancing activity (e.g., WO2005/074656), Aspergillus oryzae beta-glucosidase fusion protein (e.g., one disclosed in WO2008/057637, in particular as SEQ ID NOs: 59 and 60), and Aspergillus aculeatus xylanase (e.g., Xyl II in WO 94/21785).

[0538] In another embodiment, the cellulolytic enzyme composition comprises a Trichoderma reesei cellulolytic preparation, further comprising Thermoascus aurantiacus GH61A polypeptide having cellulolytic enhancing activity (e.g., SEQ ID NO: 2 in WO2005/074656), Aspergillus fumigatus beta-glucosidase (e.g., SEQ ID NO: 2 of WO2005/047499) and Aspergillus aculeatus xylanase (Xyl II disclosed in WO 94/21785).

[0539] In another embodiment, the cellulolytic enzyme composition comprises a Trichoderma reesei cellulolytic enzyme composition, further comprising Thermoascus aurantiacus AA9 (GH61A) polypeptide having cellulolytic enhancing activity (e.g., SEQ ID NO: 2 in WO2005/074656), Aspergillus fumigatus beta-glucosidase (e.g., SEQ ID NO: 2 of WO2005/047499) and Aspergillus aculeatus xylanase (e.g., Xyl II disclosed in WO 94/21785).

[0540] In another embodiment, the cellulolytic enzyme composition is a Trichoderma reesei cellulolytic enzyme composition, further comprising Penicillium emersonii AA9 (GH61A) polypeptide having cellulolytic enhancing activity, in particular the one disclosed in WO2011/041397, Aspergillus fumigatus beta-glucosidase (e.g., SEQ ID NO: 2 of WO2005/047499) and Aspergillus fumigatus xylanase (e.g., Xyl III in WO2006/078256).

[0541] In another embodiment, the cellulolytic enzyme composition comprises a Trichoderma reesei cellulolytic enzyme composition, further comprising Penicillium emersonii AA9 (GH61A) polypeptide having cellulolytic enhancing activity, in particular the one disclosed in WO2011/041397, Aspergillus fumigatus beta-glucosidase (e.g., SEQ ID NO: 2 of WO2005/047499), Aspergillus fumigatus xylanase (e.g., Xyl III in WO2006/078256), and CBH I from Aspergillus fumigatus, in particular Cel7A CBH1 disclosed as SEQ ID NO: 2 in WO2011/057140.

[0542] In another embodiment, the cellulolytic enzyme composition is a Trichoderma reesei cellulolytic enzyme composition, further comprising Penicillium emersonii AA9 (GH61A) polypeptide having cellulolytic enhancing activity, in particular the one disclosed in WO2011/041397, Aspergillus fumigatus beta-glucosidase (e.g., SEQ ID NO: 2 of WO2005/047499), Aspergillus fumigatus xylanase (e.g., Xyl III in WO2006/078256), CBH I from Aspergillus fumigatus, in particular Cel7A CBH1 disclosed as SEQ ID NO: 2 in WO2011/057140, and CBH II derived from Aspergillus fumigatus in particular the one disclosed as SEQ ID NO: 4 in WO2013/028928.

[0543] In another embodiment, the cellulolytic enzyme composition is a Trichoderma reesei cellulolytic enzyme composition, further comprising Penicillium emersonii AA9 (GH61A) polypeptide having cellulolytic enhancing activity, in particular the one disclosed in WO2011/041397, Aspergillus fumigatus beta-glucosidase (e.g., SEQ ID NO: 2 of WO 2005/047499) or variant thereof with one or more, in particular all, of the following substitutions: F100D, S283G, N456E, F512Y; Aspergillus fumigatus xylanase (e.g., Xyl III in WO2006/078256), CBH I from Aspergillus fumigatus, in particular Cel7A CBH I disclosed as SEQ ID NO: 2 in WO2011/057140, and CBH II derived from Aspergillus fumigatus, in particular the one disclosed in WO2013/028928.

[0544] In another embodiment, the cellulolytic enzyme composition is a Trichoderma reesei cellulolytic enzyme composition comprising the CBH I (GENSEQP Accession No. AZY49536 (WO2012/103293); a CBH II (GENSEQP Accession No. AZY49446 (WO2012/103288); a beta-glucosidase variant (GENSEQP Accession No. AZU67153 (WO2012/44915)), in particular with one or more, in particular all, of the following substitutions: F100D, S283G, N456E, F512Y; and AA9 (GH61 polypeptide) (GENSEQP Accession No. BAL61510 (WO2013/028912)).

[0545] In another embodiment, the cellulolytic enzyme composition is a Trichoderma reesei cellulolytic enzyme composition comprising a CBH I (GENSEQP Accession No. AZY49536 (WO2012/103293)); a CBH II (GENSEQP Accession No. AZY49446 (WO2012/103288); a GH10 xylanase (GENSEQP Accession No. BAK46118 (WO2013/019827)); and a beta-xylosidase (GENSEQP Accession No. AZ104896 (WO2011/057140)).

[0546] In another embodiment, the cellulolytic enzyme composition is a Trichoderma reesei cellulolytic enzyme composition comprising a CBH I (GENSEQP Accession No. AZY49536 (WO2012/103293)); a CBH II (GENSEQP Accession No. AZY49446 (WO2012/103288)); and an AA9 (GH61 polypeptide; GENSEQP Accession No. BAL61510 (WO2013/028912)).

[0547] In another embodiment, the cellulolytic enzyme composition is a Trichoderma reesei cellulolytic enzyme composition comprising a CBH I (GENSEQP Accession No. AZY49536 (WO2012/103293)); a CBH II (GENSEQP Accession No. AZY49446 (WO2012/103288)), an AA9 (GH61 polypeptide; GENSEQP Accession No. BAL61510 (WO2013/028912)), and a catalase (GENSEQP Accession No. BAC11005 (WO2012/130120)).

[0548] In an embodiment, the cellulolytic enzyme composition is a Trichoderma reesei cellulolytic enzyme composition comprising a CBH I (GENSEQP Accession No. AZY49446 (WO2012/103288); a CBH II (GENSEQP Accession No. AZY49446 (WO2012/103288)), a beta-glucosidase variant (GENSEQP Accession No. AZU67153 (WO2012/44915)), with one or more, in particular all, of the following substitutions: F100D, S283G, N456E, F512Y; an AA9 (GH61 polypeptide; GENSEQP Accession No. BAL61510 (WO2013/028912)), a GH10 xylanase (GENSEQP Accession No. BAK46118 (WO2013/019827)), and a beta-xylosidase (GENSEQP Accession No. AZ104896 (WO2011/057140)).

[0549] In an embodiment, the cellulolytic composition is a Trichoderma reesei cellulolytic enzyme preparation comprising an EG I (Swissprot Accession No. P07981), EG II (EMBL Accession No. M19373), CBH I (supra); CBH II (supra); beta-glucosidase variant (supra) with the following substitutions: F100D, S283G, N456E, F512Y; an AA9 (GH61 polypeptide; supra), GH10 xylanase (supra); and beta-xylosidase (supra).

[0550] All cellulolytic enzyme compositions disclosed in WO2013/028928 are also contemplated and hereby incorporated by reference.

[0551] The cellulolytic enzyme composition comprises or may further comprise one or more (several) proteins selected from the group consisting of a cellulase, a AA9 (i.e., GH61) polypeptide having cellulolytic enhancing activity, a hemicellulase, an expansin, an esterase, a laccase, a ligninolytic enzyme, a pectinase, a peroxidase, a protease, and a swollenin.

[0552] In one embodiment, the cellulolytic enzyme composition is a commercial cellulolytic enzyme composition. Examples of commercial cellulolytic enzyme compositions suitable for use in a process of the invention include: CELLIC® CTec (Novozymes A/S), CELLIC® CTec2 (Novozymes A/S), CELLIC® CTec3 (Novozymes A/S), CELLUCLAST™ (Novozymes A/S), SPEZYME™ CP (Genencor Int.), ACCELLERASE™ 1000, ACCELLERASE 1500, ACCELLERASE™ TRIO (DuPont), FILTRASE® NL (DSM); METHAPLUS® S/L 100 (DSM), ROHAMENT™ 7069 W (Röhm GmbH), or ALTERNAFUEL® CMAX3™ (Dyadic International, Inc.). The cellulolytic enzyme composition may be added in an amount effective from about 0.001 to about 5.0 wt. % of solids, e.g., about 0.025 to about 4.0 wt. % of solids or about 0.005 to about 2.0 wt. % of solids.

[0553] Additional enzymes, and compositions thereof can be found in WO2011/153516 and WO2016/045569 (the contents of which are incorporated herein).

[0554] Additional polynucleotides encoding suitable cellulolytic enzymes may be obtained from microorganisms of any genus, including those readily available within the UniProtKB database (www.uniprot.org).

[0555] The cellulolytic enzyme coding sequences can also be used to design nucleic acid probes to identify and clone DNA encoding cellulolytic enzymes from strains of different genera or species, as described supra.

[0556] The polynucleotides encoding cellulolytic enzymes may also be identified and obtained from other sources including microorganisms isolated from nature (e.g., soil, composts, water, etc.) or DNA samples obtained directly from natural materials (e.g., soil, composts, water, etc,) as described supra.

[0557] Techniques used to isolate or clone polynucleotides encoding cellulolytic enzymes are described supra.

[0558] In one embodiment, the cellulolytic enzyme has at least 60%, e.g., at least 65%, at least 70%, at least 75%, at least 80%, at least 85%, at least 90%, at least 91%, at least 92%, at least 93%, at least 94%, at least 95%, at least 96%, at least 97%, at least 98%, at least 99%, or 100% sequence identity to any cellulolytic enzyme described or referenced herein (e.g., any endoglucanase, cellobiohydrolase, or beta-glucosidase). In one aspect, the cellulolytic enzyme sequence differs by no more than ten amino acids, e.g., by no more than five amino acids, by no more than four amino acids, by no more than three amino acids, by no more than two amino acids, or by one amino acid from any cellulolytic enzyme described or referenced herein. In one embodiment, the cellulolytic enzyme comprises or consists of the amino acid sequence of any cellulolytic enzyme described or referenced herein, allelic variant, or a fragment thereof having cellulolytic enzyme activity. In one embodiment, the cellulolytic enzyme has an amino acid substitution, deletion, and/or insertion of one or more (e.g., two, several) amino acids. In some embodiments, the total number of amino acid substitutions, deletions and/or insertions is not more than 10, e.g., not more than 9, 8, 7, 6, 5, 4, 3, 2, or 1.

[0559] In some embodiments, the cellulolytic enzyme has at least 20%, e.g., at least 40%, at least 50%, at least 60%, at least 70%, at least 80%, at least 90%, at least 95%, at least 96%, at least 97%, at least 98%, at least 99%, or 100% of the cellulolytic enzyme activity of any cellulolytic enzyme described or referenced herein (e.g., any endoglucanase, cellobiohydrolase, or beta-glucosidase) under the same conditions.

[0560] In one embodiment, the cellulolytic enzyme coding sequence hybridizes under at least low stringency conditions, e.g., medium stringency conditions, medium-high stringency conditions, high stringency conditions, or very high stringency conditions with the full-length complementary strand of the coding sequence from any cellulolytic enzyme described or referenced herein (e.g., any endoglucanase, cellobiohydrolase, or beta-glucosidase). In one embodiment, the cellulolytic enzyme coding sequence has at least 65%, e.g., at least 70%, at least 75%, at least 80%, at least 85%, at least 85%, at least 90%, at least 91%, at least 92%, at least 93%, at least 94%, at least 95%, at least 96%, at least 97%, at least 98%, at least 99%, or 100% sequence identity with the coding sequence from any cellulolytic enzyme described or referenced herein.

[0561] In one embodiment, the polynucleotide encoding the cellulolytic enzyme comprises the coding sequence of any cellulolytic enzyme described or referenced herein (e.g., any endoglucanase, cellobiohydrolase, or beta-glucosidase). In one embodiment, the polynucleotide encoding the cellulolytic enzyme comprises a subsequence of the coding sequence from any cellulolytic enzyme described or referenced herein, wherein the subsequence encodes a polypeptide having cellulolytic enzyme activity. In one embodiment, the number of nucleotides residues in the subsequence is at least 75%, e.g., at least 80%, 85%, 90%, or 95% of the number of the referenced coding sequence.

[0562] The cellulolytic enzyme can also include fused polypeptides or cleavable fusion polypeptides, as described supra.

### Xylose Metabolism

[0563] In one aspect, the fermenting organism (e.g., yeast cell) further comprises a heterologous polynucleotide encoding a xylose isomerase (XI). The xylose isomerase may be any xylose isomerase that is suitable for the host cells and the methods described herein, such as a naturally occurring xylose isomerase or a variant thereof that retains xylose isomerase activity. In one embodiment, the xylose isomerase is present in the cytosol of the host cells.

[0564] In some embodiments, the fermenting organism comprising a heterologous polynucleotide encoding a xylose isomerase has an increased level of xylose isomerase activity compared to the host cells without the heterologous polynucleotide encoding the xylose isomerase, when cultivated under the same conditions. In some embodiments, the fermenting organisms have an increased level of xylose isomerase activity of at least 5%, e.g., at least 10%, at least 15%, at least 20%, at least 25%, at least 50%, at least 100%, at least 150%, at least 200%, at least 300%, or at 500% compared to the host cells without the heterologous polynucleotide encoding the xylose isomerase, when cultivated under the same conditions.

[0565] Exemplary xylose isomerases that can be used with the recombinant host cells and methods of use described herein include, but are not limited to, XIs from the fungus Piromyces sp. (WO2003/062430) or other sources (Madhavan et al., 2009, Appl Microbiol Biotechnol. 82(6), 1067-1078) have been expressed in S. cerevisiae host cells. Still other XIs suitable for expression in yeast have been described in US 2012/0184020 (an XI from Ruminococcus flavefaciens), WO2011/078262 (several XIs from Reticulitermes speratus and Mastotermes darwiniensis) and WO2012/009272 (constructs and fungal cells containing an XI from Abiotrophia defectiva). U.S. Pat. No. 8,586,336 describes a S. cerevisiae host cell expressing an XI obtained by bovine rumen fluid.

[0566] Additional polynucleotides encoding suitable xylose isomerases may be obtained from microorganisms of any genus, including those readily available within the UniProtKB database (www.uniprot.org). In one embodiment, the xylose isomerases is a bacterial, a yeast, or a filamentous fungal xylose isomerase, e.g., obtained from any of the microorganisms described or referenced herein, as described supra.

[0567] The xylose isomerase coding sequences can also be used to design nucleic acid probes to identify and clone DNA encoding xylose isomerases from strains of different genera or species, as described supra.

[0568] The polynucleotides encoding xylose isomerases may also be identified and obtained from other sources including microorganisms isolated from nature (e.g., soil, composts, water, etc.) or DNA samples obtained directly from natural materials (e.g., soil, composts, water, etc,) as described supra.

[0569] Techniques used to isolate or clone polynucleotides encoding xylose isomerases are described supra.

[0570] In one embodiment, the xylose isomerase has at least 60%, e.g., at least 65%, at least 70%, at least 75%, at least 80%, at least 85%, at least 90%, at least 91%, at least 92%, at least 93%, at least 94%, at least 95%, at least 96%, at least 97%, at least 98%, at least 99%, or 100% sequence identity to any xylose isomerase described or referenced herein. In one aspect, the xylose isomerase sequence differs by no more than ten amino acids, e.g., by no more than five amino acids, by no more than four amino acids, by no more than three amino acids, by no more than two amino acids, or by one amino acid from any xylose isomerase described or referenced herein. In one embodiment, the xylose isomerase comprises or consists of the amino acid sequence of any xylose isomerase described or referenced herein, allelic variant, or a fragment thereof having xylose isomerase activity. In one embodiment, the xylose isomerase has an amino acid substitution, deletion, and/or insertion of one or more (e.g., two, several) amino acids. In some embodiments, the total number of amino acid substitutions, deletions and/or insertions is not more than 10, e.g., not more than 9, 8, 7, 6, 5, 4, 3, 2, or 1.

[0571] In some embodiments, the xylose isomerase has at least 20%, e.g., at least 40%, at least 50%, at least 60%, at least 70%, at least 80%, at least 90%, at least 95%, at least 96%, at least 97%, at least 98%, at least 99%, or 100% of the xylose isomerase activity of any xylose isomerase described or referenced herein under the same conditions.

[0572] In one embodiment, the xylose isomerase coding sequence hybridizes under at least low stringency conditions, e.g., medium stringency conditions, medium-high stringency conditions, high stringency conditions, or very high stringency conditions with the full-length complementary strand of the coding sequence from any xylose isomerase described or referenced herein. In one embodiment, the xylose isomerase coding sequence has at least 65%, e.g., at least 70%, at least 75%, at least 80%, at least 85%, at least 85%, at least 90%, at least 91%, at least 92%, at least 93%, at least 94%, at least 95%, at least 96%, at least 97%, at least 98%, at least 99%, or 100% sequence identity with the coding sequence from any xylose isomerase described or referenced herein.

[0573] In one embodiment, the heterologous polynucleotide encoding the xylose isomerase comprises the coding sequence of any xylose isomerase described or referenced herein. In one embodiment, the heterologous polynucleotide encoding the xylose isomerase comprises a subsequence of the coding sequence from any xylose isomerase described or referenced herein, wherein the subsequence encodes a polypeptide having xylose isomerase activity. In one embodiment, the number of nucleotides residues in the subsequence is at least 75%, e.g., at least 80%, 85%, 90%, or 95% of the number of the referenced coding sequence.

[0574] The xylose isomerases can also include fused polypeptides or cleavable fusion polypeptides, as described supra.

[0575] In one aspect, the fermenting organism (e.g., yeast cell) further comprises a heterologous polynucleotide encoding a xylulokinase (XK). A xylulokinase, as used herein, provides enzymatic activity for converting D-xylulose to xylulose 5-phosphate. The xylulokinase may be any xylulokinase that is suitable for the host cells and the methods described herein, such as a naturally occurring xylulokinase or a variant thereof that retains xylulokinase activity. In one embodiment, the xylulokinase is present in the cytosol of the host cells.

[0576] In some embodiments, the fermenting organisms comprising a heterologous polynucleotide encoding a xylulokinase have an increased level of xylulokinase activity compared to the host cells without the heterologous polynucleotide encoding the xylulokinase, when cultivated under the same conditions. In some embodiments, the host cells have an increased level of xylose isomerase activity of at least 5%, e.g., at least 10%, at least 15%, at least 20%, at least 25%, at least 50%, at least 100%, at least 150%, at least 200%, at least 300%, or at 500% compared to the host cells without the heterologous polynucleotide encoding the xylulokinase, when cultivated under the same conditions.

[0577] Exemplary xylulokinases that can be used with the fermenting organisms and methods of use described herein include, but are not limited to, a Saccharomyces cerevisiae xylulokinase (e.g., the xylulokinase described as SEQ ID NO: 75 of WO2018/222990). Additional polynucleotides encoding suitable xylulokinases may be obtained from microorganisms of any genus, including those readily available within the UniProtKB database (www.uniprot.org). In one embodiment, the xylulokinases is a bacterial, a yeast, or a filamentous fungal xylulokinase, e.g., obtained from any of the microorganisms described or referenced herein, as described supra.

[0578] The xylulokinase coding sequences can also be used to design nucleic acid probes to identify and clone DNA encoding xylulokinases from strains of different genera or species, as described supra.

[0579] The polynucleotides encoding xylulokinases may also be identified and obtained from other sources including microorganisms isolated from nature (e.g., soil, composts, water, etc.) or DNA samples obtained directly from natural materials (e.g., soil, composts, water, etc,) as described supra.

[0580] Techniques used to isolate or clone polynucleotides encoding xylulokinases are described supra.

[0581] In one embodiment, the xylulokinase has at least 60%, e.g., at least 65%, at least 70%, at least 75%, at least 80%, at least 85%, at least 90%, at least 91%, at least 92%, at least 93%, at least 94%, at least 95%, at least 96%, at least 97%, at least 98%, at least 99%, or 100% sequence identity to any xylulokinase described or referenced herein. In one embodiment, the xylulokinase sequence differs by no more than ten amino acids, e.g., by no more than five amino acids, by no more than four amino acids, by no more than three amino acids, by no more than two amino acids, or by one amino acid from any xylulokinase described or referenced herein. In one embodiment, the xylulokinase comprises or consists of the amino acid sequence of any xylulokinase described or referenced herein, allelic variant, or a fragment thereof having xylulokinase activity. In one embodiment, the xylulokinase has an amino acid substitution, deletion, and/or insertion of one or more (e.g., two, several) amino acids. In some embodiments, the total number of amino acid substitutions, deletions and/or insertions is not more than 10, e.g., not more than 9, 8, 7, 6, 5, 4, 3, 2, or 1.

[0582] In some embodiments, the xylulokinase has at least 20%, e.g., at least 40%, at least 50%, at least 60%, at least 70%, at least 80%, at least 90%, at least 95%, at least 96%, at least 97%, at least 98%, at least 99%, or 100% of the xylulokinase activity of any xylulokinase described or referenced herein under the same conditions.

[0583] In one embodiment, the xylulokinase coding sequence hybridizes under at least low stringency conditions, e.g., medium stringency conditions, medium-high stringency conditions, high stringency conditions, or very high stringency conditions with the full-length complementary strand of the coding sequence from any xylulokinase described or referenced herein. In one embodiment, the xylulokinase coding sequence has at least 65%, e.g., at least 70%, at least 75%, at least 80%, at least 85%, at least 85%, at least 90%, at least 91%, at least 92%, at least 93%, at least 94%, at least 95%, at least 96%, at least 97%, at least 98%, at least 99%, or 100% sequence identity with the coding sequence from any xylulokinase described or referenced herein.

[0584] In one embodiment, the heterologous polynucleotide encoding the xylulokinase comprises the coding sequence of any xylulokinase described or referenced herein. In one embodiment, the heterologous polynucleotide encoding the xylulokinase comprises a subsequence of the coding sequence from any xylulokinase described or referenced herein, wherein the subsequence encodes a polypeptide having xylulokinase activity. In one embodiment, the number of nucleotides residues in the subsequence is at least 75%, e.g., at least 80%, 85%, 90%, or 95% of the number of the referenced coding sequence.

[0585] The xylulokinases can also include fused polypeptides or cleavable fusion polypeptides, as described supra.

[0586] In one aspect, the fermenting organism (e.g., yeast cell) further comprises a heterologous polynucleotide encoding a ribulose 5 phosphate 3-epimerase (RPE1). A ribulose 5 phosphate 3-epimerase, as used herein, provides enzymatic activity for converting L-ribulose 5-phosphate to L-xylulose 5-phosphate (EC 5.1.3.22). The RPE1 may be any RPE1 that is suitable for the host cells and the methods described herein, such as a naturally occurring RPE1 or a variant thereof that retains RPE1 activity. In one embodiment, the RPE1 is present in the cytosol of the host cells.

[0587] In one embodiment, the recombinant cell comprises a heterologous polynucleotide encoding a ribulose 5 phosphate 3-epimerase (RPE1), wherein the RPE1 is Saccharomyces cerevisiae RPE1, or an RPE1 having at least 60%, e.g., at least 65%, 70%, 75%, 80%, 85%, 90%, 95%, 97%, 98%, 99%, or 100% sequence identity to a Saccharomyces cerevisiae RPE1.

[0588] In one aspect, the fermenting organism (e.g., yeast cell) further comprises a heterologous polynucleotide encoding a ribulose 5 phosphate isomerase (RKI1). A ribulose 5 phosphate isomerase, as used herein, provides enzymatic activity for converting ribose-5-phophate to ribulose 5-phosphate. The RKI1 may be any RKI1 that is suitable for the host cells and the methods described herein, such as a naturally occurring RKI1 or a variant thereof that retains RKI1 activity. In one embodiment, the RKI1 is present in the cytosol of the host cells.

[0589] In one embodiment, the fermenting organism comprises a heterologous polynucleotide encoding a ribulose 5 phosphate isomerase (RKI1), wherein the RKI1 is a Saccharomyces cerevisiae RKI1, or an RKI1 having at least 60%, e.g., at least 65%, 70%, 75%, 80%, 85%, 90%, 95%, 97%, 98%, 99%, or 100% sequence identity to a Saccharomyces cerevisiae RKI1.

[0590] In one aspect, the fermenting organism (e.g., yeast cell) further comprises a heterologous polynucleotide encoding a transketolase (TKL1). The TKL1 may be any TKL1 that is suitable for the host cells and the methods described herein, such as a naturally occurring TKL1 or a variant thereof that retains TKL1 activity. In one embodiment, the TKL1 is present in the cytosol of the host cells.

[0591] In one embodiment, the fermenting organism comprises a heterologous polynucleotide encoding a transketolase (TKL1), wherein the TKL1 is a Saccharomyces cerevisiae TKL1, or a TKL1 having at least 60%, e.g., at least 65%, 70%, 75%, 80%, 85%, 90%, 95%, 97%, 98%, 99%, or 100% sequence identity to a Saccharomyces cerevisiae TKL1.

[0592] In one aspect, the fermenting organism (e.g., yeast cell) further comprises a heterologous polynucleotide encoding a transaldolase (TAL1). The TAL1 may be any TAL1 that is suitable for the host cells and the methods described herein, such as a naturally occurring TAL1 or a variant thereof that retains TAL1 activity. In one embodiment, the TAL1 is present in the cytosol of the host cells.

[0593] In one embodiment, the fermenting organism comprises a heterologous polynucleotide encoding a transketolase (TAL1), wherein the TAL1 is a Saccharomyces cerevisiae TAL1, or a TAL1 having at least 60%, e.g., at least 65%, 70%, 75%, 80%, 85%, 90%, 95%, 97%, 98%, 99%, or 100% sequence identity to a Saccharomyces cerevisiae TAL1.

### Fermentation Products

[0594] A fermentation product can be any substance derived from the fermentation. The fermentation product can be, without limitation, an alcohol (e.g., arabinitol, n-butanol, isobutanol, ethanol, glycerol, methanol, ethylene glycol, 1,3-propanediol [propylene glycol], butanediol, glycerin, sorbitol, and xylitol); an alkane (e.g., pentane, hexane, heptane, octane, nonane, decane, undecane, and dodecane), a cycloalkane (e.g., cyclopentane, cyclohexane, cycloheptane, and cyclooctane), an alkene (e.g., pentene, hexene, heptene, and octene); an amino acid (e.g., aspartic acid, glutamic acid, glycine, lysine, serine, and threonine); a gas (e.g., methane, hydrogen (H₂), carbon dioxide (CO₂), and carbon monoxide (CO)); isoprene; a ketone (e.g., acetone); an organic acid (e.g., acetic acid, acetonic acid, adipic acid, ascorbic acid, citric acid, 2,5-diketo-D-gluconic acid, formic acid, fumaric acid, glucaric acid, gluconic acid, glucuronic acid, glutaric acid, 3-hydroxypropionic acid, itaconic acid, lactic acid, malic acid, malonic acid, oxalic acid, oxaloacetic acid, propionic acid, succinic acid, and xylonic acid); and polyketide.

[0595] In one embodiment, the fermentation product is an alcohol. The term “alcohol” encompasses a substance that contains one or more hydroxyl moieties. The alcohol can be, but is not limited to, n-butanol, isobutanol, ethanol, methanol, arabinitol, butanediol, ethylene glycol, glycerin, glycerol, 1,3-propanediol, sorbitol, xylitol. See, for example, Gong et al., 1999, Ethanol production from renewable resources, in Advances in Biochemical Engineering/Biotechnology, Scheper, T., ed., Springer-Verlag Berlin Heidelberg, Germany, 65: 207-241; Silveira and Jonas, 2002, Appl. Microbiol. Biotechnol. 59: 400-408; Nigam and Singh, 1995, Process Biochemistry 30(2): 117-124; Ezeji et al., 2003, World Journal of Microbiology and Biotechnology 19(6): 595-603. In one embodiment, the fermentation product is ethanol.

[0596] In another embodiment, the fermentation product is an alkane. The alkane may be an unbranched or a branched alkane. The alkane can be, but is not limited to, pentane, hexane, heptane, octane, nonane, decane, undecane, or dodecane.

[0597] In another embodiment, the fermentation product is a cycloalkane. The cycloalkane can be, but is not limited to, cyclopentane, cyclohexane, cycloheptane, or cyclooctane. In another aspect, the fermentation product is an alkene. The alkene may be an unbranched or a branched alkene. The alkene can be, but is not limited to, pentene, hexene, heptene, or octene.

[0598] In another aspect, the fermentation product is an amino acid. The organic acid can be, but is not limited to, aspartic acid, glutamic acid, glycine, lysine, serine, or threonine. See, for example, Richard and Margaritis, 2004, Biotechnology and Bioengineering 87(4): 501-515.

[0599] In another embodiment, the fermentation product is a gas. The gas can be, but is not limited to, methane, H₂, CO₂, or CO. See, for example, Kataoka et al., 1997, Water Science and Technology 36(6-7): 41-47; and Gunaseelan, 1997, Biomass and Bioenergy 13(1-2): 83-114.

[0600] In another embodiment, the fermentation product is isoprene.

[0601] In another embodiment, the fermentation product is a ketone. The term “ketone” encompasses a substance that contains one or more ketone moieties. The ketone can be, but is not limited to, acetone.

[0602] In another embodiment, the fermentation product is an organic acid. The organic acid can be, but is not limited to, acetic acid, acetonic acid, adipic acid, ascorbic acid, citric acid, 2,5-diketo-D-gluconic acid, formic acid, fumaric acid, glucaric acid, gluconic acid, glucuronic acid, glutaric acid, 3-hydroxypropionic acid, itaconic acid, lactic acid, malic acid, malonic acid, oxalic acid, propionic acid, succinic acid, or xylonic acid. See, for example, Chen and Lee, 1997, Appl. Biochem. Biotechnol. 63-65: 435-448.

[0603] In another embodiment, the fermentation product is polyketide.

### Recovery

[0604] The fermentation product, e.g., ethanol, can optionally be recovered from the fermentation medium using any method known in the art including, but not limited to, chromatography, electrophoretic procedures, differential solubility, distillation, or extraction. For example, alcohol is separated from the fermented cellulosic material and purified by conventional methods of distillation. Ethanol with a purity of up to about 96 vol. % can be obtained, which can be used as, for example, fuel ethanol, drinking ethanol, i.e., potable neutral spirits, or industrial ethanol.

[0605] In some embodiments of the methods, the fermentation product after being recovered is substantially pure. With respect to the methods herein, “substantially pure” intends a recovered preparation that contains no more than 15% impurity, wherein impurity intends compounds other than the fermentation product (e.g., ethanol). In one variation, a substantially pure preparation is provided wherein the preparation contains no more than 25% impurity, or no more than 20% impurity, or no more than 10% impurity, or no more than 5% impurity, or no more than 3% impurity, or no more than 1% impurity, or no more than 0.5% impurity.

[0606] Suitable assays to test for the production of ethanol and contaminants, and sugar consumption can be performed using methods known in the art. For example, ethanol product, as well as other organic compounds, can be analyzed by methods such as HPLC (High Performance Liquid Chromatography), GC-MS (Gas Chromatography Mass Spectroscopy) and LC-MS (Liquid Chromatography-Mass Spectroscopy) or other suitable analytical methods using routine procedures well known in the art. The release of ethanol in the fermentation broth can also be tested with the culture supernatant. Byproducts and residual sugar in the fermentation medium (e.g., glucose or xylose) can be quantified by HPLC using, for example, a refractive index detector for glucose and alcohols, and a UV detector for organic acids (Lin et al., Biotechnol. Bioeng. 90:775 -779 (2005)), or using other suitable assay and detection methods well known in the art.

[0607] The invention may further be described in the following numbered paragraphs:

[0608] Paragraph [1]. A method of producing a fermentation product from a starch-containing or cellulosic-containing material comprising:

(a) saccharifying the starch-containing or cellulosic-containing material; and
(b) fermenting the saccharified material of step (a) with a fermenting organism;

[0609] wherein the fermenting organism comprises a genetic modification that increases or decreases expression of a transporter, or regulator thereof.

[0610] Paragraph [2]. The method of paragraph [1], wherein the fermenting organism has increased or decreased expression (e.g., by at least 5%, e.g., at least 10%, at least 15%, at least 20%, at least 25%, at least 50%, at least 100%, at least 150%, at least 200%, at least 300%, or at 500%) of a transporter, or regulator thereof when compared to Saccharomyces cerevisiae strain Ethanol Red® (deposited under Accession No. V14/007039 at National Measurement Institute, Victoria, Australia) under the same conditions.

[0611] Paragraph [3]. The method of paragraph [1] or [2], wherein the fermenting organism requires less supplemental nitrogen (e.g., urea, ammonia, ammonium hydroxide) during fermentation to maintain the same yield of fermentation product, when compared to an otherwise identical fermenting organism lacking the genetic modification that increases or decreases expression of a transporter, or regulator thereof.

[0612] Paragraph [4]. The method of any one of paragraphs [1]-[3], wherein the fermenting organism comprises a genetic modification that increases or decreases expression of a transporter, such as any one of the transporters shown in Table 1 (e.g., any one of SEQ ID NOs: 86-170).

[0613] Paragraph [5]. The method of any one of paragraphs [1]-[4], wherein the fermenting organism comprises a heterologous polynucleotide encoding a transporter having at least 60%, e.g., at least 65%, 70%, 75%, 80%, 85%, 90%, 95%, 97%, 98%, 99%, or 100% sequence identity to the amino acid sequence of any one of the transporters shown in Table 1 (e.g., any one of SEQ ID NOs: 86-170).

[0614] Paragraph [6]. The method of any one of paragraphs [1]-[5], wherein the fermenting organism comprises a heterologous polynucleotide encoding a transporter having at least 60%, e.g., at least 65%, 70%, 75%, 80%, 85%, 90%, 95%, 97%, 98%, 99%, or 100% sequence identity to the amino acid sequence of SEQ ID NO: 129, SEQ ID NO: 163 or SEQ ID NO: 164.

[0615] Paragraph [7]. The method of any one of paragraphs [1]-[6], wherein the fermenting organism comprises a heterologous polynucleotide encoding a transporter that differs by no more than ten amino acids, e.g., by no more than five amino acids, by no more than four amino acids, by no more than three amino acids, by no more than two amino acids, or by one amino acid from any one of the transporters shown in Table 1 (e.g., any one of SEQ ID NOs: 86-170).

[0616] Paragraph [8]. The method of any one of paragraphs [1]-[7], wherein the fermenting organism comprises a heterologous polynucleotide encoding a transporter comprising or consisting of the amino acid sequence of any one of the transporters shown in Table 1 (e.g., any one of SEQ ID NOs: 86-170).

[0617] Paragraph [9]. The method of any one of paragraphs [1]-[8], wherein the fermenting organism comprises a disruption to an endogenous transporter gene, such as any one of the transporter genes shown in Table 1 (e.g., any one of SEQ ID NOs: 1-85).

[0618] Paragraph [10]. The method of paragraph [9], wherein the disrupted endogenous transporter gene is inactivated.

[0619] Paragraph [11]. The method of paragraph [9] or [10], wherein the coding sequence of the endogenous transporter gene has at least 60%, e.g., at least 65%, at least 70%, at least 75%, at least 80%, at least 85%, at least 90%, at least 95%, at least 96%, at least 97%, at least 98%, at least 99%, or 100% sequence identity to the coding sequence of any one of the transporters shown in Table 1 (e.g., any one of SEQ ID NOs: 1-85).

[0620] Paragraph [12]. The method of any one of paragraphs [9]-[11], wherein the endogenous transporter gene encodes a transporter having at least 60%, e.g., at least 65%, at least 70%, at least 75%, at least 80%, at least 85%, at least 90%, at least 95%, at least 96%, at least 97%, at least 98%, at least 99%, or 100% sequence identity to the any one of the transporters shown in Table 1 (e.g., any one of SEQ ID NOs: 86-170).

[0621] Paragraph [13]. The method of any one of paragraphs [1]-[12], wherein the fermenting organism comprises a genetic modification that increases or decreases expression of a regulator, such as any one of the regulators shown in Table 2 (e.g., any one of SEQ ID NOs:

[0622] 231-290).

[0623] Paragraph [14]. The method of any one of paragraphs [1]-[13], wherein the fermenting organism comprises a heterologous polynucleotide encoding a regulator, wherein the regulator has at least 60%, e.g., at least 65%, 70%, 75%, 80%, 85%, 90%, 95%, 97%, 98%, 99%, or 100% sequence identity to the amino acid sequence of any one of the regulators shown in Table 2 (e.g., any one of SEQ ID NOs: 231-290).

[0624] Paragraph [15]. The method of any one of paragraphs [1]-[14], wherein the fermenting organism comprises a heterologous polynucleotide encoding regulator, wherein the regulator differs by no more than ten amino acids, e.g., by no more than five amino acids, by no more than four amino acids, by no more than three amino acids, by no more than two amino acids, or by one amino acid from any one of the regulators shown in Table 2 (e.g., any one of SEQ ID NOs: 231-290).

[0625] Paragraph [16]. The method of any one of paragraphs [1]-[15], wherein the fermenting organism comprises a heterologous polynucleotide encoding a regulator, wherein the regulator has an amino acid sequence comprising or consisting of the amino acid sequence of any one of the regulators shown in Table 2 (e.g., any one of SEQ ID NOs: 231-290).

[0626] Paragraph [17]. The method of any one of paragraphs [1]-[16], wherein the fermenting organism comprises a disruption to an endogenous regulator gene, such as any one of the regulator genes shown in Table 2 (e.g., any one of SEQ ID NOs: 171-230).

[0627] Paragraph [18]. The method of paragraph [17], wherein the disrupted endogenous regulator gene is inactivated.

[0628] Paragraph [19]. The method of paragraph [17] or [18], wherein the coding sequence of the endogenous regulator gene has at least 60%, e.g., at least 65%, at least 70%, at least 75%, at least 80%, at least 85%, at least 90%, at least 95%, at least 96%, at least 97%, at least 98%, at least 99%, or 100% sequence identity to the coding sequence of any one of the regulator genes shown in Table 2 (e.g., any one of SEQ ID NOs: 171-230).

[0629] Paragraph [20]. The method of any one of paragraphs [17]-[19], wherein the endogenous regulator gene encodes a regulator having at least 60%, e.g., at least 65%, at least 70%, at least 75%, at least 80%, at least 85%, at least 90%, at least 95%, at least 96%, at least 97%, at least 98%, at least 99%, or 100% sequence identity to the any one of the regulators shown in Table 2 (e.g., any one of SEQ ID NOs: 231-290).

[0630] Paragraph [21]. The method of any one of paragraphs [1]-[20], comprising liquefying the starch-containing material at a temperature above the initial gelatinization temperature in the presence of an alpha-amylase prior to saccharification.

[0631] Paragraph [22]. The method of paragraph [21], comprising adding a protease in liquefaction.

[0632] Paragraph [23]. The method of paragraph [22], wherein the protease is a serine protease, e.g., an S8 protease.

[0633] Paragraph [24]. The method of paragraph [23], wherein the protease is a bacterial protease, particularly a protease derived form Pyrococcus, Palaeococcus, or Thermococcus, more particularly Pyrococcus furiosus, Palaeococcus ferrophilus, Thermococcus litoralis, Thermococcus thioreducens.

[0634] Paragraph [25]. The method of any one of paragraphs [21]-[24], wherein the protease is selected from the group consisting of SEQ ID NO: 291, SEQ ID NO: 292, SEQ ID NO: 293, SEQ ID NO: 294, and SEQ ID NO: 295, or a variant of any one of SEQ ID NO: 291, SEQ ID NO: 292, SEQ ID NO: 293, SEQ ID NO: 294, and SEQ ID NO: 295 having at least at least 60%, e.g., at least 65%, at least 70%, at least 75%, at least 80%, at least 85%, at least 90%, at least 91%, at least 92%, at least 93%, at least 94%, at least 95%, at least 96%, at least 97%, at least 98%, or at least 99% sequence identity thereto.

[0635] Paragraph [26]. The method of any one of paragraphs [1]-[25], wherein fermentation and saccharification are performed simultaneously in a simultaneous saccharification and fermentation (SSF).

[0636] Paragraph [27]. The method of any one of paragraphs [1]-[26], wherein fermentation and saccharification are performed sequentially (SHF).

[0637] Paragraph [28]. The method of any one of paragraphs [1]-[27], comprising recovering the fermentation product from the from the fermentation.

[0638] Paragraph [29]. The method of paragraph [28], wherein recovering the fermentation product from the from the fermentation comprises distillation.

[0639] Paragraph [30]. The method of any one of paragraphs [1]-[29], wherein the fermentation product is ethanol.

[0640] Paragraph [31]. The method of paragraph [30], wherein the ethanol yield is more than 1.0%, e.g., more than 2.0%, more than 2.5%, more than 3.0%, more than 3.5%, more than 4.0%, more than 4.5%, more than 5.0%, more than 5.5%, more than 6.0%, more than 6.5%, more than 7.0%, more than 7.5%, more than 8.0%, more than 8.5%, more than 9.0%, more than 9.5%, or more than 10.0%, greater than Saccharomyces cerevisiae strain Ethanol Red® (deposited under Accession No. V14/007039 at National Measurement Institute, Victoria, Australia) under the same conditions (e.g., under conditions described herein, such as after 53 hours fermentation).

[0641] Paragraph [32]. The method of paragraph [30] or [31], wherein the ethanol yield is more than 1.0%, e.g., more than 2.0%, more than 2.5%, more than 3.0%, more than 3.5%, more than 4.0%, more than 4.5%, more than 5.0%, more than 5.5%, more than 6.0%, more than 6.5%, more than 7.0%, more than 7.5%, more than 8.0%, more than 8.5%, more than 9.0%, more than 9.5%, or more than 10.0%, greater when compared to an otherwise identical fermenting organism lacking the genetic modification that increases or decreases expression of a regulator under the same conditions (e.g., under conditions described herein, such as after 53 hours fermentation).

[0642] Paragraph [33]. The method of any one of paragraphs [1]-[32], wherein saccharification of step (a) occurs on a starch-containing material, and wherein the starch-containing material is either gelatinized or ungelatinized starch.

[0643] Paragraph [34]. The method of any one of paragraphs [1]-[33], wherein the fermenting organism comprises a heterologous polynucleotide encoding a glucoamylase.

[0644] Paragraph [35]. The method of paragraph [34], wherein the glucoamylase is a Pycnoporus glycoamylase (e.g. a Pycnoporus sanguineus glucoamylase described herein), a Gloeophyllum glucoamylase (e.g. a Gloeophyllum sepiarium or Gloeophyllum trabeum glucoamylase described herein), or a Saccharomycopsis glucoamylase (e.g., a Saccharomycopsis fibuligera glucoamylase described herein).

[0645] Paragraph [36]. The method of any one of paragraphs [1]-[35], wherein the fermenting organism comprises a heterologous polynucleotide encoding an alpha-amylase.

[0646] Paragraph [37]. The method of paragraph [21] or [36], wherein the alpha-amylase is a Bacillus alpha-amylase (e.g., a Bacillus stearothermophilus, Bacillus amyloliquefaciens, or Bacillus licheniformis alpha-amylase described herein), or a Debaryomyces alpha-amylase (e.g., a Debaryomyces occidentalis alpha-amylase described herein).

[0647] Paragraph [38]. The method of any one of paragraphs [1]-[37], wherein the fermenting organism comprises a heterologous polynucleotide encoding a protease.

[0648] Paragraph [39]. The method of paragraph [38], wherein the protease is a Meripilus giganteus, Trametes versicolor, Dichomitus squalens, Polyporus arcularius, Lenzites betulinus, Ganoderma lucidum, Neolentinus lepideus, or Bacillus sp. 19138 protease (e.g., a protease having any one of SEQ ID NOs: 9-73 of WO2018/222990).

[0649] Paragraph [40]. The method of any one of paragraphs [1]-[39], wherein saccharification of step (a) occurs on a cellulosic-containing material, and wherein the cellulosic-containing material is pretreated.

[0650] Paragraph [41]. The method of paragraph [36], wherein the pretreatment is a dilute acid pretreatment.

[0651] Paragraph [42]. The method of any one of paragraphs [1]-[41], wherein saccharification occurs on a cellulosic-containing material, and wherein the enzyme composition comprises one or more enzymes selected from a cellulase, an AA9 polypeptide, a hemicellulase, a CIP, an esterase, an expansin, a ligninolytic enzyme, an oxidoreductase, a pectinase, a protease, and a swollenin.

[0652] Paragraph [43]. The method of paragraph [42], wherein the cellulase is one or more enzymes selected from an endoglucanase, a cellobiohydrolase, and a beta-glucosidase.

[0653] Paragraph [44]. The method of paragraph [42], wherein the hemicellulase is one or more enzymes selected a xylanase, an acetylxylan esterase, a feruloyl esterase, an arabinofuranosidase, a xylosidase, and a glucuronidase.

[0654] Paragraph [45]. The method of any one of paragraphs [1]-[44], wherein the fermenting organism is a Saccharomyces, Rhodotorula, Schizosaccharomyces, Kluyveromyces, Pichia, Issatchenkia, Hansenula, Rhodosporidium, Candida, Torulaspora, Zygosaccharomyces, Yarrowia, Lipomyces, Cryptococcus, or Dekkera sp. cell.

[0655] Paragraph [46]. The method of any one of paragraphs [1]-[45], wherein the fermenting organism is a I. orientalis, C. lambica, S. bulderi or a S. cerevisiae cell.

[0656] Paragraph [47]. The method of any one of paragraphs [1]-[46], wherein the fermenting organism is a Saccharomyces cerevisiae cell.

[0657] Paragraph [48]. A yeast cell comprising a genetic modification that increases or decreases expression of a transporter, or regulator thereof.

[0658] Paragraph [49]. The yeast cell of paragraph [48], wherein the cell has increased or decreased expression (e.g., by at least 5%, e.g., at least 10%, at least 15%, at least 20%, at least 25%, at least 50%, at least 100%, at least 150%, at least 200%, at least 300%, or at 500%) of a transporter, or regulator thereof when compared to Saccharomyces cerevisiae strain Ethanol Red® (deposited under Accession No. V14/007039 at National Measurement Institute, Victoria, Australia) under the same conditions.

[0659] Paragraph [50]. The yeast cell of paragraph [48] or [49], wheren the cell is capable of maintaining the same yield of a fermentation product with less supplemental nitrogen (e.g., urea, ammonia, ammonium hydroxide) during fermentation, when compared to an otherwise identical fermenting organism lacking the genetic modification that increases or decreases expression of a transporter, or regulator thereof.

[0660] Paragraph [51]. The yeast cell of any one of paragraphs [48]-[50], wherein the cell comprises a genetic modification that increases or decreases expression of a transporter, such as the any one of the transporters shown in Table 1 (e.g., any one of SEQ ID NOs: 86-170).

[0661] Paragraph [52]. The yeast cell of any one of paragraphs [48]-[51], wherein the cell comprises a heterologous polynucleotide encoding a transporter having at least 60%, e.g., at least 65%, 70%, 75%, 80%, 85%, 90%, 95%, 97%, 98%, 99%, or 100% sequence identity to the amino acid sequence of any one of the transporters shown in Table 1 (e.g., any one of SEQ ID NOs: 86-170).

[0662] Paragraph [53]. The yeast cell of any one of paragraphs [48]-[52], wherein the cell comprises a heterologous polynucleotide encoding a transporter having at least 60%, e.g., at least 65%, 70%, 75%, 80%, 85%, 90%, 95%, 97%, 98%, 99%, or 100% sequence identity to the amino acid sequence of SEQ ID NO: 129, SEQ ID NO: 163 or SEQ ID NO: 164.

[0663] Paragraph [54]. The yeast cell of any one of paragraphs [48]-[53], wherein the cell comprises a heterologous polynucleotide encoding a transporter that differs by no more than ten amino acids, e.g., by no more than five amino acids, by no more than four amino acids, by no more than three amino acids, by no more than two amino acids, or by one amino acid from any one of the transporters shown in Table 1 (e.g., any one of SEQ ID NOs: 86-170).

[0664] Paragraph [55]. The yeast cell of any one of paragraphs [48]-[54], wherein the cell comprises a heterologous polynucleotide encoding a transporter comprising or consisting of the amino acid sequence of any one of the transporters shown in Table 1 (e.g., any one of SEQ ID NOs: 86-170).

[0665] Paragraph [56]. The yeast cell of any one of paragraphs [48]-[55], wherein the cell comprises a disruption to an endogenous transporter gene, such as any one of the transporter genes shown in Table 1 (e.g., any one of SEQ ID NOs: 1-85).

[0666] Paragraph [57]. The yeast cell of paragraph [56], wherein the disrupted endogenous transporter gene is inactivated.

[0667] Paragraph [58]. The yeast cell of paragraph [57], wherein the coding sequence of the endogenous transporter gene has at least 60%, e.g., at least 65%, at least 70%, at least 75%, at least 80%, at least 85%, at least 90%, at least 95%, at least 96%, at least 97%, at least 98%, at least 99%, or 100% sequence identity to the coding sequence of any one of the transporters shown in Table 1 (e.g., any one of SEQ ID NOs: 1-85).

[0668] Paragraph [59]. The yeast cell of paragraph [57] or [58], wherein the endogenous transporter gene encodes a transporter having at least 60%, e.g., at least 65%, at least 70%, at least 75%, at least 80%, at least 85%, at least 90%, at least 95%, at least 96%, at least 97%, at least 98%, at least 99%, or 100% sequence identity to the any one of the transporters shown in Table 1 (e.g., any one of SEQ ID NOs: 86-170).

[0669] Paragraph [60]. The yeast cell of any one of paragraphs [48]-[59], wherein the cell comprises a genetic modification that increases or decreases expression of a regulator, such as any one of the regulators shown in Table 2 (e.g., any one of SEQ ID NOs: 231-290).

[0670] Paragraph [61]. The yeast cell of any one of paragraphs [48]-[60], wherein the cell comprises a heterologous polynucleotide encoding a regulator, wherein the regulator has at least 60%, e.g., at least 65%, 70%, 75%, 80%, 85%, 90%, 95%, 97%, 98%, 99%, or 100% sequence identity to the amino acid sequence of any one of the regulators shown in Table 2 (e.g., any one of SEQ ID NOs: 231-290).

[0671] Paragraph [62]. The yeast cell of any one of paragraphs [48]-[61], wherein the cell comprises a heterologous polynucleotide encoding regulator, wherein the regulator differs by no more than ten amino acids, e.g., by no more than five amino acids, by no more than four amino acids, by no more than three amino acids, by no more than two amino acids, or by one amino acid from any one of the regulators shown in Table 2 (e.g., any one of SEQ ID NOs: 231-290).

[0672] Paragraph [63]. The yeast cell of any one of paragraphs [48]-[62], wherein the cell comprises a heterologous polynucleotide encoding a regulator, wherein the regulator has an amino acid sequence comprising or consisting of the amino acid sequence of any one of the regulators shown in Table 2 (e.g., any one of SEQ ID NOs: 231-290).

[0673] Paragraph [64]. The yeast cell of any one of paragraphs [48]-[63], wherein the cell comprises a disruption to an endogenous regulator gene, wheren the regulator gene is any one of the regulator genes shown in Table 2 (e.g., any one of SEQ ID NOs: 171-230).

[0674] Paragraph [65]. The yeast cell of paragraph [64], wherein the disrupted endogenous regulator gene is inactivated.

[0675] Paragraph [66]. The yeast cell of paragraph [64] or [65], wherein the coding sequence of the endogenous regulator gene has at least 60%, e.g., at least 65%, at least 70%, at least 75%, at least 80%, at least 85%, at least 90%, at least 95%, at least 96%, at least 97%, at least 98%, at least 99%, or 100% sequence identity to the coding sequence of any one of the regulator genes shown in Table 2 (e.g., any one of SEQ ID NOs: 171-230).

[0676] Paragraph [67]. The yeast cell of any one of paragraphs [64]-[66], wherein the endogenous gene encodes a regulator having at least 60%, e.g., at least 65%, at least 70%, at least 75%, at least 80%, at least 85%, at least 90%, at least 95%, at least 96%, at least 97%, at least 98%, at least 99%, or 100% sequence identity to the any one of the regulators shown in Table 2 (e.g., any one of SEQ ID NOs: 231-290).

[0677] Paragraph [68]. The yeast cell of any one of paragraphs [48]-[67], wherein the cell comprises a heterologous polynucleotide encoding a glucoamylase.

[0678] Paragraph [69]. The yeast cell of paragraph [68], wherein the glucoamylase is a Pycnoporus glycoamylase (e.g. a Pycnoporus sanguineus glucoamylase described herein), a Gloeophyllum glucoamylase (e.g. a Gloeophyllum sepiarium or Gloeophyllum trabeum glucoamylase described herein), or a Saccharomycopsis glucoamylase (e.g., a Saccharomycopsis fibuligera glucoamylase, such as SEQ ID NO: 102 or 103 of WO2018/222990).

[0679] Paragraph [70]. The yeast cell of any one of paragraphs [48]-[69], wherein the cell comprises a heterologous polynucleotide encoding an alpha-amylase.

[0680] Paragraph [71]. The yeast cell of paragraph [70], wherein the alpha-amylase is a Bacillus alpha-amylase (e.g., a Bacillus stearothermophilus, Bacillus amyloliquefaciens, or Bacillus licheniformis alpha-amylase described herein), or a Debaryomyces alpha-amylase (e.g., a Debaryomyces occidentalis alpha-amylase described herein).

[0681] Paragraph [72]. The yeast cell of any one of paragraphs [48]-[71], wherein the cell comprises a heterologous polynucleotide encoding protease.

[0682] Paragraph [73]. The yeast cell of paragraph [72], wherein the protease is a Meripilus giganteus, Trametes versicolor, Dichomitus squalens, Polyporus arcularius, Lenzites betulinus, Ganoderma lucidum, Neolentinus lepideus, or Bacillus sp. 19138 protease (e.g., a protease having the sequence of any one of SEQ ID NOs: 9-73 of WO2018/222990).

[0683] Paragraph [74]. The yeast cell of any one of paragraphs [48]-[73], wherein the cell is a Saccharomyces, Rhodotorula, Schizosaccharomyces, Kluyveromyces, Pichia, Issatchenkia, Hansenula, Rhodosporidium, Candida, Torulaspora, Zygosaccharomyces, Yarrowia, Lipomyces, Cryptococcus, or Dekkera sp. cell.

[0684] Paragraph [75]. The yeast cell of any one of paragraphs [48]-[74], wherein the cell is a I. orientalis, C. lambica, S. bulderi or a S. cerevisiae cell.

[0685] Paragraph [76]. The yeast cell of any one of paragraphs [48]-[75], wherein the cell is a Saccharomyces cerevisiae cell.

[0686] Paragraph [77]. A Saccharomyces cerevisiae yeast cell comprising:

(1) a heterologous polynucleotide encoding a transporter, and
(2) a heterologous polynucleotide encoding a glucoamylase, alpha-amylase, or protease;

[0687] wherein the transporter has at least 60%, e.g., at least 65%, 70%, 75%, 80%, 85%, 90%, 95%, 97%, 98%, 99%, or 100% sequence identity to the amino acid sequence of SEQ ID NO: 163 or SEQ ID NO: 164.

[0688] Paragraph [78]. The yeast cell of paragraph [77], wheren the cell comprises a heterologous polynucleotide encoding a transporter that has at least 60%, e.g., at least 65%, 70%, 75%, 80%, 85%, 90%, 95%, 97%, 98%, 99%, or 100% sequence identity to the amino acid sequence of SEQ ID NO: 163; and a heterologous polynucleotide encoding a transporter that has at least 60%, e.g., at least 65%, 70%, 75%, 80%, 85%, 90%, 95%, 97%, 98%, 99%, or 100% sequence identity to the amino acid sequence of SEQ ID NO: 164.

[0689] Paragraph [79]. The yeast cell of paragraph [77], wherein the transporter differs by no more than ten amino acids, e.g., by no more than five amino acids, by no more than four amino acids, by no more than three amino acids, by no more than two amino acids, or by one amino acid from amino acid sequence of SEQ ID NO: 163 or SEQ ID NO: 164.

[0690] Paragraph [80]. The yeast cell of paragraph [77], wherein the transporter comprises or consists of the amino acid sequence of SEQ ID NO: 163 or SEQ ID NO: 164.

[0691] Paragraph [81]. The yeast cell of any one of paragraphs [77]-[80], wherein the heterologous polynucleotide encoding the transporter is introduced into the cell using recombinant techniques.

[0692] Paragraph [82]. The yeast cell of any one of paragraphs [77]-[81], wherein the heterologous polynucleotide encoding the transporter is operably linked to a promoter that is foreign to the polynucleotide.

[0693] Paragraph [83]. The yeast cell of any one of paragraphs [77]-[80], wherein the heterologous polynucleotide encoding the transporter is introduced into the cell using non-recombinant breeding techniques.

[0694] Paragraph [84]. The yeast cell of any one of paragraphs [77]-[83], wheren the cell is capable of maintaining the same yield of a fermentation product with less supplemental nitrogen (e.g., urea, ammonia, ammonium hydroxide) during fermentation, when compared to an otherwise identical fermenting organism lacking the heterologous polynucleotide encoding the transporter.

[0695] Paragraph [85]. The yeast cell of any one of paragraphs [77]-[84], wheren the cell is capable of increased consumption of tripeptides or tetrapeptides under conditions described herein (e.g., decreased residual tripeptides or tetrapeptides in the fermentation medium after 29 hours of fermentation), when compared to an otherwise identical fermenting organism lacking the heterologous polynucleotide encoding the transporter.

[0696] Paragraph [86]. The yeast cell of any one of paragraphs [77]-[85], wherein the cell comprises a heterologous polynucleotide encoding a glucoamylase.

[0697] Paragraph [87]. The yeast cell of paragraph [86], wherein the heterologous polynucleotide encoding the glucoamylase is operably linked to a promoter that is foreign to the polynucleotide.

[0698] Paragraph [88]. The yeast cell of paragraph [86] or [87], wherein the glucoamylase is a Pycnoporus glycoamylase (e.g. a Pycnoporus sanguineus glucoamylase described herein), a Gloeophyllum glucoamylase (e.g. a Gloeophyllum sepiarium or Gloeophyllum trabeum glucoamylase described herein), or a Saccharomycopsis glucoamylase (e.g., a Saccharomycopsis fibuligera glucoamylase, such as SEQ ID NO: 102 or 103 of WO2018/222990).

[0699] Paragraph [89]. The yeast cell of any one of paragraphs [77]-[88], wherein the cell comprises a heterologous polynucleotide encoding an alpha-amylase.

[0700] Paragraph [90]. The yeast cell of paragraph [89], wherein the heterologous polynucleotide encoding the alpha-amylase is operably linked to a promoter that is foreign to the polynucleotide.

[0701] Paragraph [91]. The yeast cell of paragraph [89] or [90], wherein the alpha-amylase is a Bacillus alpha-amylase (e.g., a Bacillus stearothermophilus, Bacillus amyloliquefaciens, or Bacillus licheniformis alpha-amylase described herein), or a Debaryomyces alpha-amylase (e.g., a Debaryomyces occidentalis alpha-amylase described herein).

[0702] Paragraph [92]. The yeast cell of any one of paragraphs [77]-[91], wherein the cell comprises a heterologous polynucleotide encoding protease.

[0703] Paragraph [93]. The yeast cell of paragraph [92], wherein the heterologous polynucleotide encoding the protease is operably linked to a promoter that is foreign to the polynucleotide.

[0704] Paragraph [94]. The yeast cell of [92] or [93], wherein the protease is a Meripilus giganteus, Trametes versicolor, Dichomitus squalens, Polyporus arcularius, Lenzites betulinus, Ganoderma lucidum, Neolentinus lepideus, or Bacillus sp. 19138 protease (e.g., a protease having the sequence of any one of SEQ ID NOs: 9-73 of WO2018/222990).

[0705] Paragraph [95]. The yeast cell of any one of paragraphs [77]-[94], wherein the cell further comprises a heterologous polynucleotide encoding a transporter having at least 60%, e.g., at least 65%, 70%, 75%, 80%, 85%, 90%, 95%, 97%, 98%, 99%, or 100% sequence identity to the amino acid sequence of any one of the transporters of SEQ ID NOs: 86-162 and 165-170.

[0706] Paragraph [96]. The yeast cell of any one of paragraphs [77]-[95], wherein the cell further comprises a heterologous polynucleotide encoding a transporter having at least 60%, e.g., at least 65%, 70%, 75%, 80%, 85%, 90%, 95%, 97%, 98%, 99%, or 100% sequence identity to the amino acid sequence of SEQ ID NO: 129, SEQ ID NO: 130 or SEQ ID NO: 161.

[0707] Paragraph [97]. The yeast cell of any one of paragraphs [77]-[96], wherein the cell comprises a disruption to an endogenous transporter gene.

[0708] Paragraph [98]. The yeast cell of [97], wherein the disrupted endogenous transporter gene is inactivated.

[0709] Paragraph [99]. The yeast cell of [97] or [98], wherein the coding sequence of the endogenous transporter gene has at least 60%, e.g., at least 65%, at least 70%, at least 75%, at least 80%, at least 85%, at least 90%, at least 95%, at least 96%, at least 97%, at least 98%, at least 99%, or 100% sequence identity to the coding sequence of any one of the transporters shown in Table 1 (e.g., any one of SEQ ID NOs: 1-85).

[0710] Paragraph [100]. The yeast cell of any one of paragraphs [97]-[99], wherein the endogenous transporter gene encodes a transporter having at least 60%, e.g., at least 65%, at least 70%, at least 75%, at least 80%, at least 85%, at least 90%, at least 95%, at least 96%, at least 97%, at least 98%, at least 99%, or 100% sequence identity to the any one of the transporters shown in Table 1 (e.g., any one of SEQ ID NOs: 86-170).

[0711] Paragraph [101]. The yeast cell of any one of paragraphs [77]-[100], wherein the cell further comprises a heterologous polynucleotide encoding a regulator, wherein the regulator has at least 60%, e.g., at least 65%, 70%, 75%, 80%, 85%, 90%, 95%, 97%, 98%, 99%, or 100% sequence identity to the amino acid sequence of any one of the regulators shown in Table 2 (e.g., any one of SEQ ID NOs: 231-290).

[0712] Paragraph [102]. The yeast cell of any one of paragraphs [77]-[101], wherein the cell comprises a disruption to an endogenous regulator gene.

[0713] Paragraph [103]. The yeast cell of [102], wherein the disrupted endogenous regulator gene is inactivated.

[0714] Paragraph [104]. The yeast cell of [102] or [103], wherein the coding sequence of the endogenous regulator gene has at least 60%, e.g., at least 65%, at least 70%, at least 75%, at least 80%, at least 85%, at least 90%, at least 95%, at least 96%, at least 97%, at least 98%, at least 99%, or 100% sequence identity to the coding sequence of any one of the regulator genes shown in Table 2 (e.g., any one of SEQ ID NOs: 171-230).

[0715] Paragraph [105]. The yeast cell of any one of paragraphs [102]-[104], wherein the endogenous gene encodes a regulator having at least 60%, e.g., at least 65%, at least 70%, at least 75%, at least 80%, at least 85%, at least 90%, at least 95%, at least 96%, at least 97%, at least 98%, at least 99%, or 100% sequence identity to the any one of the regulators shown in Table 2 (e.g., any one of SEQ ID NOs: 231-290).

[0716] Paragraph [106]. The yeast cell of paragraph any one of paragraphs [77]-[105], wherein the cell is a recombinant cell.

[0717] Paragraph [107]. A Saccharomyces cerevisiae yeast cell comprising a heterologous polynucleotide encoding a transporter,

[0718] wherein the transporter has at least 60%, e.g., at least 65%, 70%, 75%, 80%, 85%, 90%, 95%, 97%, 98%, 99%, or 100% sequence identity to the amino acid sequence of SEQ ID NO: 163 or SEQ ID NO: 164;

[0719] and with the proviso that the yeast cell is other than:

[0720] Saccharomyces cerevisiae MBG4851 (deposited under Accession No. V14/004037 at National Measurement Institute, Victoria, Australia) or a derivative thereof,

[0721] Saccharomyces cerevisiae MBG4911 (deposited under Accession No. V15/001459 at National Measurement Institute, Victoria, Australia) or a derivative thereof,

[0722] Saccharomyces cerevisiae MBG4913 (deposited under Accession No. V15/001460 at National Measurement Institute, Victoria, Australia) or a derivative thereof,

[0723] Saccharomyces cerevisiae MBG4914 (deposited under Accession No. V15/001461 at National Measurement Institute, Victoria, Australia) or a derivative thereof,

[0724] Saccharomyces cerevisiae MBG4930 (deposited under Accession No. V15/004035 at National Measurement Institute, Victoria, Australia) or a derivative thereof,

[0725] Saccharomyces cerevisiae MBG4931 (deposited under Accession No. V15/004036 at National Measurement Institute, Victoria, Australia) or a derivative thereof,

[0726] Saccharomyces cerevisiae MBG4932 (deposited under Accession No. V15/004037 at National Measurement Institute, Victoria, Australia) or a derivative thereof.

[0727] Paragraph [108]. The yeast cell of paragraph [107], wheren the cell comprises a heterologous polynucleotide encoding a transporter that has at least 60%, e.g., at least 65%, 70%, 75%, 80%, 85%, 90%, 95%, 97%, 98%, 99%, or 100% sequence identity to the amino acid sequence of SEQ ID NO: 163; and a heterologous polynucleotide encoding a transporter that has at least 60%, e.g., at least 65%, 70%, 75%, 80%, 85%, 90%, 95%, 97%, 98%, 99%, or 100% sequence identity to the amino acid sequence of SEQ ID NO: 164.

[0728] Paragraph [109]. The yeast cell of paragraph [107], wherein the transporter differs by no more than ten amino acids, e.g., by no more than five amino acids, by no more than four amino acids, by no more than three amino acids, by no more than two amino acids, or by one amino acid from amino acid sequence of SEQ ID NO: 163 or SEQ ID NO: 164.

[0729] Paragraph [110]. The yeast cell of paragraph [107], wherein the transporter comprises or consists of the amino acid sequence of SEQ ID NO: 163 or SEQ ID NO: 164.

[0730] Paragraph [111]. The yeast cell of any one of paragraphs [107]-[110], wherein the heterologous polynucleotide encoding the transporter is introduced into the cell using recombinant techniques.

[0731] Paragraph [112]. The yeast cell of any one of paragraphs [107]-[111], wherein the heterologous polynucleotide encoding the transporter is operably linked to a promoter that is foreign to the polynucleotide.

[0732] Paragraph [113]. The yeast cell of any one of paragraphs [107]-[110], wherein the heterologous polynucleotide encoding the transporter is introduced into the cell using non-recombinant breeding techniques.

[0733] Paragraph [114]. The yeast cell of any one of paragraphs [107]-[113], wheren the cell is capable of maintaining the same yield of a fermentation product with less supplemental nitrogen (e.g., urea, ammonia, ammonium hydroxide) during fermentation, when compared to an otherwise identical fermenting organism lacking the heterologous polynucleotide encoding the transporter.

[0734] Paragraph [115]. The yeast cell of any one of paragraphs [107]-[114], wheren the cell is capable of increased consumption of tripeptides or tetrapeptides under conditions described herein (e.g., decreased residual tripeptides or tetrapeptides in the fermentation medium after 29 hours of fermentation), when compared to an otherwise identical fermenting organism lacking the heterologous polynucleotide encoding the transporter.

[0735] Paragraph [116]. The yeast cell of paragraph any one of paragraphs [107]-[115], wherein the cell further comprises a heterologous polynucleotide encoding a glucoamylase.

[0736] Paragraph [117]. The yeast cell of paragraph [116], wherein the heterologous polynucleotide encoding the glucoamylase is operably linked to a promoter that is foreign to the polynucleotide.

[0737] Paragraph [118]. The yeast cell of paragraph [116] or [117], wherein the glucoamylase is a Pycnoporus glycoamylase (e.g. a Pycnoporus sanguineus glucoamylase described herein), a Gloeophyllum glucoamylase (e.g. a Gloeophyllum sepiarium or Gloeophyllum trabeum glucoamylase described herein), or a Saccharomycopsis glucoamylase (e.g., a Saccharomycopsis fibuligera glucoamylase, such as SEQ ID NO: 102 or 103 of WO2018/222990).

[0738] Paragraph [119]. The yeast cell of any one of paragraphs [107]-[118], wherein the cell further comprises a heterologous polynucleotide encoding an alpha-amylase.

[0739] Paragraph [120]. The yeast cell of paragraph [119], wherein the heterologous polynucleotide encoding the alpha-amylase is operably linked to a promoter that is foreign to the polynucleotide.

[0740] Paragraph [121]. The yeast cell of paragraph [119] or [120], wherein the alpha-amylase is a Bacillus alpha-amylase (e.g., a Bacillus stearothermophilus, Bacillus amyloliquefaciens, or Bacillus licheniformis alpha-amylase described herein), or a Debaryomyces alpha-amylase (e.g., a Debaryomyces occidentalis alpha-amylase described herein).

[0741] Paragraph [122]. The yeast cell of paragraph any one of paragraphs [107]-[121], wherein the cell further comprises a heterologous polynucleotide encoding protease.

[0742] Paragraph [123]. The yeast cell of paragraph [122], wherein the heterologous polynucleotide encoding the protease is operably linked to a promoter that is foreign to the polynucleotide.

[0743] Paragraph [124]. The yeast cell of [122] or [123], wherein the protease is a Meripilus giganteus, Trametes versicolor, Dichomitus squalens, Polyporus arcularius, Lenzites betulinus, Ganoderma lucidum, Neolentinus lepideus, or Bacillus sp. 19138 protease (e.g., a protease having the sequence of any one of SEQ ID NOs: 9-73 of WO2018/222990).

[0744] Paragraph [125]. The yeast cell of any one of paragraphs [107]-[124], wherein the cell further comprises a heterologous polynucleotide encoding a transporter having at least 60%, e.g., at least 65%, 70%, 75%, 80%, 85%, 90%, 95%, 97%, 98%, 99%, or 100% sequence identity to the amino acid sequence of any one of the transporters of SEQ ID NOs: 86-162 and 165-170.

[0745] Paragraph [126]. The yeast cell of any one of paragraphs [107]-[125], wherein the cell further comprises a heterologous polynucleotide encoding a transporter having at least 60%, e.g., at least 65%, 70%, 75%, 80%, 85%, 90%, 95%, 97%, 98%, 99%, or 100% sequence identity to the amino acid sequence of SEQ ID NO: 129, SEQ ID NO: 130 or SEQ ID NO: 161.

[0746] Paragraph [127]. The yeast cell of any one of paragraphs [107]-[126], wherein the cell comprises a disruption to an endogenous transporter gene.

[0747] Paragraph [128]. The yeast cell of [127], wherein the disrupted endogenous transporter gene is inactivated.

[0748] Paragraph [129]. The yeast cell of [127] or [128], wherein the coding sequence of the endogenous transporter gene has at least 60%, e.g., at least 65%, at least 70%, at least 75%, at least 80%, at least 85%, at least 90%, at least 95%, at least 96%, at least 97%, at least 98%, at least 99%, or 100% sequence identity to the coding sequence of any one of the transporters shown in Table 1 (e.g., any one of SEQ ID NOs: 1-85).

[0749] Paragraph [130]. The yeast cell of any one of paragraphs [127]-[129], wherein the endogenous transporter gene encodes a transporter having at least 60%, e.g., at least 65%, at least 70%, at least 75%, at least 80%, at least 85%, at least 90%, at least 95%, at least 96%, at least 97%, at least 98%, at least 99%, or 100% sequence identity to the any one of the transporters shown in Table 1 (e.g., any one of SEQ ID NOs: 86-170).

[0750] Paragraph [131]. The yeast cell of any one of paragraphs [107]-[130], wherein the cell further comprises a heterologous polynucleotide encoding a regulator, wherein the regulator has at least 60%, e.g., at least 65%, 70%, 75%, 80%, 85%, 90%, 95%, 97%, 98%, 99%, or 100% sequence identity to the amino acid sequence of any one of the regulators shown in Table 2 (e.g., any one of SEQ ID NOs: 231-290).

[0751] Paragraph [132]. The yeast cell of any one of paragraphs [107]-[131], wherein the cell comprises a disruption to an endogenous regulator gene.

[0752] Paragraph [133]. The yeast cell of [132], wherein the disrupted endogenous regulator gene is inactivated.

[0753] Paragraph [134]. The yeast cell of [132] or [133], wherein the coding sequence of the endogenous regulator gene has at least 60%, e.g., at least 65%, at least 70%, at least 75%, at least 80%, at least 85%, at least 90%, at least 95%, at least 96%, at least 97%, at least 98%, at least 99%, or 100% sequence identity to the coding sequence of any one of the regulator genes shown in Table 2 (e.g., any one of SEQ ID NOs: 171-230).

[0754] Paragraph [135]. The yeast cell of any one of paragraphs [132]-[134], wherein the endogenous gene encodes a regulator having at least 60%, e.g., at least 65%, at least 70%, at least 75%, at least 80%, at least 85%, at least 90%, at least 95%, at least 96%, at least 97%, at least 98%, at least 99%, or 100% sequence identity to the any one of the regulators shown in Table 2 (e.g., any one of SEQ ID NOs: 231-290).

[0755] Paragraph [136]. The yeast cell of paragraph any one of paragraphs [107]-[135], wherein the cell is a recombinant cell.

[0756] Paragraph [137]. The yeast cell of paragraph any one of paragraphs [107]-[135], wherein the cell is non-recombinant cell.

[0757] Paragraph [138]. A yeast cell comprising a heterologous polynucleotide encoding a transporter, wherein the transporter has at least 60%, e.g., at least 65%, 70%, 75%, 80%, 85%, 90%, 95%, 97%, 98%, 99%, or 100% sequence identity to the amino acid sequence of SEQ ID NO: 163 or SEQ ID NO: 164, and wherein the yeast cell comprises a recombinant genetic modification that increases expression of the transporter.

[0758] Paragraph [139]. The yeast cell of paragraph [138], wheren the cell comprises a heterologous polynucleotide encoding a transporter that has at least 60%, e.g., at least 65%, 70%, 75%, 80%, 85%, 90%, 95%, 97%, 98%, 99%, or 100% sequence identity to the amino acid sequence of SEQ ID NO: 163; and a heterologous polynucleotide encoding a transporter that has at least 60%, e.g., at least 65%, 70%, 75%, 80%, 85%, 90%, 95%, 97%, 98%, 99%, or 100% sequence identity to the amino acid sequence of SEQ ID NO: 164.

[0759] Paragraph [140]. The yeast cell of paragraph [138], wherein the transporter differs by no more than ten amino acids, e.g., by no more than five amino acids, by no more than four amino acids, by no more than three amino acids, by no more than two amino acids, or by one amino acid from amino acid sequence of SEQ ID NO: 163 or SEQ ID NO: 164.

[0760] Paragraph [141]. The yeast cell of paragraph [138], wherein the transporter comprises or consists of the amino acid sequence of SEQ ID NO: 163 or SEQ ID NO: 164.

[0761] Paragraph [142]. The yeast cell of any one of paragraphs [138]-[141], wherein the heterologous polynucleotide encoding the transporter is operably linked to a promoter that is foreign to the polynucleotide.

[0762] Paragraph [143]. The yeast cell of any one of paragraphs [138]-[142], wherein the cell comprises multiple copies of the heterologous polynucleotide encoding the transporter.

[0763] Paragraph [144]. The yeast cell of paragraph [143], wherein coding sequences of the multiple copies are identical.

[0764] Paragraph [145]. The yeast cell of paragraph [143], wherein coding sequences of the multiple copies are non-identical.

[0765] Paragraph [146]. The yeast cell of any one of paragraphs [138]-[145], wheren the cell is capable of maintaining the same yield of a fermentation product with less supplemental nitrogen (e.g., urea, ammonia, ammonium hydroxide) during fermentation, when compared to an otherwise identical fermenting organism lacking the heterologous polynucleotide encoding the transporter.

[0766] Paragraph [147]. The yeast cell of any one of paragraphs [38]-[146], wheren the cell is capable of increased consumption of tripeptides or tetrapeptides under conditions described herein (e.g., decreased residual tripeptides or tetrapeptides in the fermentation medium after 29 hours of fermentation), when compared to an otherwise identical fermenting organism lacking the heterologous polynucleotide encoding the transporter.

[0767] Paragraph [148]. The yeast cell of any one of paragraphs [138]-[147], wherein the cell further comprises a heterologous polynucleotide encoding a glucoamylase.

[0768] Paragraph [149]. The yeast cell of paragraph [148], wherein the heterologous polynucleotide encoding the glucoamylase is operably linked to a promoter that is foreign to the polynucleotide.

[0769] Paragraph [150]. The yeast cell of paragraph [148] or [149], wherein the glucoamylase is a Pycnoporus glycoamylase (e.g. a Pycnoporus sanguineus glucoamylase described herein), a Gloeophyllum glucoamylase (e.g. a Gloeophyllum sepiarium or Gloeophyllum trabeum glucoamylase described herein), or a Saccharomycopsis glucoamylase (e.g., a Saccharomycopsis fibuligera glucoamylase, such as SEQ ID NO: 102 or 103 of WO2018/222990).

[0770] Paragraph [151]. The yeast cell of any one of paragraphs [138]-[150], wherein the cell further comprises a heterologous polynucleotide encoding an alpha-amylase.

[0771] Paragraph [152]. The yeast cell of paragraph [151], wherein the heterologous polynucleotide encoding the alpha-amylase is operably linked to a promoter that is foreign to the polynucleotide.

[0772] Paragraph [153]. The yeast cell of paragraph [151] or [152], wherein the alpha-amylase is a Bacillus alpha-amylase (e.g., a Bacillus stearothermophilus, Bacillus amyloliquefaciens, or Bacillus licheniformis alpha-amylase described herein), or a Debaryomyces alpha-amylase (e.g., a Debaryomyces occidentalis alpha-amylase described herein).

[0773] Paragraph [154]. The yeast cell of any one of paragraphs [138]-[153], wherein the cell further comprises a heterologous polynucleotide encoding protease.

[0774] Paragraph [155]. The yeast cell of paragraph [154], wherein the cell further comprises a heterologous polynucleotide encoding protease.

[0775] Paragraph [156]. The yeast cell of [154] or [155], wherein the protease is a Meripilus giganteus, Trametes versicolor, Dichomitus squalens, Polyporus arcularius, Lenzites betulinus, Ganoderma lucidum, Neolentinus lepideus, or Bacillus sp. 19138 protease (e.g., a protease having the sequence of any one of SEQ ID NOs: 9-73 of WO2018/222990).

[0776] Paragraph [157]. The yeast cell of any one of paragraphs [138]-[156], wherein the cell further comprises a heterologous polynucleotide encoding a transporter having at least 60%, e.g., at least 65%, 70%, 75%, 80%, 85%, 90%, 95%, 97%, 98%, 99%, or 100% sequence identity to the amino acid sequence of any one of the transporters of SEQ ID NOs: 86-162 and 165-170.

[0777] Paragraph [158]. The yeast cell of any one of paragraphs [138]-[157], wherein the cell further comprises a heterologous polynucleotide encoding a transporter having at least 60%, e.g., at least 65%, 70%, 75%, 80%, 85%, 90%, 95%, 97%, 98%, 99%, or 100% sequence identity to the amino acid sequence of SEQ ID NO: 129, SEQ ID NO: 130 or SEQ ID NO: 161.

[0778] Paragraph [159]. The yeast cell of any one of paragraphs [138]-[158], wherein the cell comprises a disruption to an endogenous transporter gene.

[0779] Paragraph [160]. The yeast cell of [159], wherein the disrupted endogenous transporter gene is inactivated.

[0780] Paragraph [161]. The yeast cell of [159] or [160], wherein the coding sequence of the endogenous transporter gene has at least 60%, e.g., at least 65%, at least 70%, at least 75%, at least 80%, at least 85%, at least 90%, at least 95%, at least 96%, at least 97%, at least 98%, at least 99%, or 100% sequence identity to the coding sequence of any one of the transporters shown in Table 1 (e.g., any one of SEQ ID NOs: 1-85).

[0781] Paragraph [162]. The yeast cell of any one of paragraphs [159]-[161], wherein the endogenous transporter gene encodes a transporter having at least 60%, e.g., at least 65%, at least 70%, at least 75%, at least 80%, at least 85%, at least 90%, at least 95%, at least 96%, at least 97%, at least 98%, at least 99%, or 100% sequence identity to the any one of the transporters shown in Table 1 (e.g., any one of SEQ ID NOs: 86-170).

[0782] Paragraph [163]. The yeast cell of any one of paragraphs [138]-[162], wherein the cell further comprises a heterologous polynucleotide encoding a regulator, wherein the regulator has at least 60%, e.g., at least 65%, 70%, 75%, 80%, 85%, 90%, 95%, 97%, 98%, 99%, or 100% sequence identity to the amino acid sequence of any one of the regulators shown in Table 2 (e.g., any one of SEQ ID NOs: 231-290).

[0783] Paragraph [164]. The yeast cell of any one of paragraphs [138]-[163], wherein the cell comprises a disruption to an endogenous regulator gene.

[0784] Paragraph [165]. The yeast cell of [164], wherein the disrupted endogenous regulator gene is inactivated.

[0785] Paragraph [166]. The yeast cell of [164] or [165], wherein the coding sequence of the endogenous regulator gene has at least 60%, e.g., at least 65%, at least 70%, at least 75%, at least 80%, at least 85%, at least 90%, at least 95%, at least 96%, at least 97%, at least 98%, at least 99%, or 100% sequence identity to the coding sequence of any one of the regulator genes shown in Table 2 (e.g., any one of SEQ ID NOs: 171-230).

[0786] Paragraph [167]. The yeast cell of any one of paragraphs [164]-[166], wherein the endogenous gene encodes a regulator having at least 60%, e.g., at least 65%, at least 70%, at least 75%, at least 80%, at least 85%, at least 90%, at least 95%, at least 96%, at least 97%, at least 98%, at least 99%, or 100% sequence identity to the any one of the regulators shown in Table 2 (e.g., any one of SEQ ID NOs: 231-290).

[0787] Paragraph [168]. The yeast cell of any one of paragraphs [138]-[167], wherein the cell is a Saccharomyces, Rhodotorula, Schizosaccharomyces, Kluyveromyces, Pichia, Issatchenkia, Hansenula, Rhodosporidium, Candida, Torulaspora, Zygosaccharomyces, Yarrowia, Lipomyces, Cryptococcus, or Dekkera sp. cell.

[0788] Paragraph [169]. The yeast cell of [168], wherein the cell is a I. orientalis, C. lambica, S. bulderi or a S. cerevisiae cell.

[0789] Paragraph [170]. The yeast cell of [169], wherein the cell is a Saccharomyces cerevisiae cell.

[0790] Paragraph [171]. A yeast cell comprising a heterologous polynucleotide encoding a transporter, wherein the transporter has at least 60%, e.g., at least 65%, 70%, 75%, 80%, 85%, 90%, 95%, 97%, 98%, 99%, or 100% sequence identity to the amino acid sequence of SEQ ID NO: 163 or SEQ ID NO: 164, and wherein the yeast further comprises a disruption to an endogenous transporter gene.

[0791] Paragraph [172]. The yeast cell of paragraph [171], wheren the cell comprises a heterologous polynucleotide encoding a transporter that has at least 60%, e.g., at least 65%, 70%, 75%, 80%, 85%, 90%, 95%, 97%, 98%, 99%, or 100% sequence identity to the amino acid sequence of SEQ ID NO: 163; and a heterologous polynucleotide encoding a transporter that has at least 60%, e.g., at least 65%, 70%, 75%, 80%, 85%, 90%, 95%, 97%, 98%, 99%, or 100% sequence identity to the amino acid sequence of SEQ ID NO: 164.

[0792] Paragraph [173]. The yeast cell of paragraph [171], wherein the transporter differs by no more than ten amino acids, e.g., by no more than five amino acids, by no more than four amino acids, by no more than three amino acids, by no more than two amino acids, or by one amino acid from amino acid sequence of SEQ ID NO: 163 or SEQ ID NO: 164.

[0793] Paragraph [174]. The yeast cell of paragraph [171], wherein the transporter comprises or consists of the amino acid sequence of SEQ ID NO: 163 or SEQ ID NO: 164.

[0794] Paragraph [175]. The yeast cell of any one of paragraphs [171]-[174], wherein the heterologous polynucleotide encoding the transporter is introduced into the cell using recombinant techniques.

[0795] Paragraph [176]. The yeast cell of any one of paragraphs [171]-[175], wherein the heterologous polynucleotide encoding the transporter is operably linked to a promoter that is foreign to the polynucleotide.

[0796] Paragraph [177]. The yeast cell of paragraph any one of paragraphs [171]-[174], wherein the heterologous polynucleotide encoding the transporter is introduced into the cell using non- recombinant breeding techniques.

[0797] Paragraph [178]. The yeast cell of any one of paragraphs [171]-[177], wherein the disrupted endogenous transporter gene is inactivated.

[0798] Paragraph [179]. The yeast cell of any one of paragraphs [171]-[178], wherein the coding sequence of the endogenous transporter gene has at least 60%, e.g., at least 65%, at least 70%, at least 75%, at least 80%, at least 85%, at least 90%, at least 95%, at least 96%, at least 97%, at least 98%, at least 99%, or 100% sequence identity to the coding sequence of any one of the transporters shown in Table 1 (e.g., any one of SEQ ID NOs: 1-85).

[0799] Paragraph [180]. The yeast cell of any one of paragraphs [171]-[179], wherein the endogenous transporter gene encodes a transporter having at least 60%, e.g., at least 65%, at least 70%, at least 75%, at least 80%, at least 85%, at least 90%, at least 95%, at least 96%, at least 97%, at least 98%, at least 99%, or 100% sequence identity to the any one of the transporters shown in Table 1 (e.g., any one of SEQ ID NOs: 86-170).

[0800] Paragraph [181]. The yeast cell of paragraph any one of paragraphs [171]-[180], wheren the cell is capable of maintaining the same yield of a fermentation product with less supplemental nitrogen (e.g., urea, ammonia, ammonium hydroxide) during fermentation, when compared to an otherwise identical fermenting organism lacking the heterologous polynucleotide encoding the transporter.

[0801] Paragraph [182]. The yeast cell of paragraph any one of paragraphs [171]-[181], wheren the cell is capable of increased consumption of tripeptides or tetrapeptides under conditions described herein (e.g., decreased residual tripeptides or tetrapeptides in the fermentation medium after 29 hours of fermentation), when compared to an otherwise identical fermenting organism lacking the heterologous polynucleotide encoding the transporter.

[0802] Paragraph [183]. The yeast cell of paragraph any one of paragraphs [171]-[182], wherein the cell further comprises a heterologous polynucleotide encoding a glucoamylase.

[0803] Paragraph [184]. The yeast cell of paragraph [183], wherein the heterologous polynucleotide encoding the glucoamylase is operably linked to a promoter that is foreign to the polynucleotide.

[0804] Paragraph [185]. The yeast cell of paragraph [183] or [184], wherein the glucoamylase is a Pycnoporus glycoamylase (e.g. a Pycnoporus sanguineus glucoamylase described herein), a Gloeophyllum glucoamylase (e.g. a Gloeophyllum sepiarium or Gloeophyllum trabeum glucoamylase described herein), or a Saccharomycopsis glucoamylase (e.g., a Saccharomycopsis fibuligera glucoamylase, such as SEQ ID NO: 102 or 103 of WO2018/222990).

[0805] Paragraph [186]. The yeast cell of any one of paragraphs [171]-[185], wherein the cell further comprises a heterologous polynucleotide encoding an alpha-amylase.

[0806] Paragraph [187]. The yeast cell of paragraph [186], wherein the heterologous polynucleotide encoding the alpha-amylase is operably linked to a promoter that is foreign to the polynucleotide.

[0807] Paragraph [188]. The yeast cell of paragraph [186] or [187], wherein the alpha-amylase is a Bacillus alpha-amylase (e.g., a Bacillus stearothermophilus, Bacillus amyloliquefaciens, or Bacillus licheniformis alpha-amylase described herein), or a Debaryomyces alpha-amylase (e.g., a Debaryomyces occidentalis alpha-amylase described herein).

[0808] Paragraph [189]. The yeast cell of any one of paragraphs [171]-[188], wherein the cell further comprises a heterologous polynucleotide encoding protease.

[0809] Paragraph [190]. The yeast cell of paragraph [189], wherein the heterologous polynucleotide encoding the protease is operably linked to a promoter that is foreign to the polynucleotide.

[0810] Paragraph [191]. The yeast cell of paragraph [189] or [190], wherein the protease is a Meripilus giganteus, Trametes versicolor, Dichomitus squalens, Polyporus arcularius, Lenzites betulinus, Ganoderma lucidum, Neolentinus lepideus, or Bacillus sp. 19138 protease (e.g., a protease having the sequence of any one of SEQ ID NOs: 9-73 of WO2018/222990).

[0811] Paragraph [192]. The yeast cell of any one of paragraphs [171]-[191], wherein the cell further comprises a heterologous polynucleotide encoding a transporter having at least 60%, e.g., at least 65%, 70%, 75%, 80%, 85%, 90%, 95%, 97%, 98%, 99%, or 100% sequence identity to the amino acid sequence of any one of the transporters of SEQ ID NOs: 86-162 and 165-170.

[0812] Paragraph [193]. The yeast cell of any one of paragraphs [171]-[192], wherein the cell further comprises a heterologous polynucleotide encoding a transporter having at least 60%, e.g., at least 65%, 70%, 75%, 80%, 85%, 90%, 95%, 97%, 98%, 99%, or 100% sequence identity to the amino acid sequence of SEQ ID NO: 129, SEQ ID NO: 130 or SEQ ID NO: 161.

[0813] Paragraph [194]. The yeast cell of any one of paragraphs [171]-[193], wherein the cell further comprises a heterologous polynucleotide encoding a regulator, wherein the regulator has at least 60%, e.g., at least 65%, 70%, 75%, 80%, 85%, 90%, 95%, 97%, 98%, 99%, or 100% sequence identity to the amino acid sequence of any one of the regulators shown in Table 2 (e.g., any one of SEQ ID NOs: 231-290).

[0814] Paragraph [195]. The yeast cell of any one of paragraphs [171]-[194], wherein the cell comprises a disruption to an endogenous regulator gene.

[0815] Paragraph [196]. The yeast cell of [195], wherein the disrupted endogenous regulator gene is inactivated.

[0816] Paragraph [197]. The yeast cell of [195] or [196], wherein the coding sequence of the endogenous regulator gene has at least 60%, e.g., at least 65%, at least 70%, at least 75%, at least 80%, at least 85%, at least 90%, at least 95%, at least 96%, at least 97%, at least 98%, at least 99%, or 100% sequence identity to the coding sequence of any one of the regulator genes shown in Table 2 (e.g., any one of SEQ ID NOs: 171-230).

[0817] Paragraph [198]. The yeast cell of any one of paragraphs [195]-[197], wherein the endogenous gene encodes a regulator having at least 60%, e.g., at least 65%, at least 70%, at least 75%, at least 80%, at least 85%, at least 90%, at least 95%, at least 96%, at least 97%, at least 98%, at least 99%, or 100% sequence identity to the any one of the regulators shown in Table 2 (e.g., any one of SEQ ID NOs: 231-290).

[0818] Paragraph [199]. The yeast cell of any one of paragraphs [171]-[199], wherein the cell is a Saccharomyces, Rhodotorula, Schizosaccharomyces, Kluyveromyces, Pichia, Issatchenkia, Hansenula, Rhodosporidium, Candida, Torulaspora, Zygosaccharomyces, Yarrowia, Lipomyces, Cryptococcus, or Dekkera sp. cell.

[0819] Paragraph [200]. The yeast cell of [199], wherein the cell is a I. orientalis, C. lambica, S. bulderi or a S. cerevisiae cell.

[0820] Paragraph [201]. The yeast cell of [200], wherein the cell is a Saccharomyces cerevisiae cell.

[0821] Paragraph [202]. A composition comprising the yeast strain of any one of paragraphs [77]-[201]and one or more naturally occurring and/or non-naturally occurring components, such as components are selected from the group consisting of: surfactants, emulsifiers, gums, swelling agents, and antioxidants.

[0822] Paragraph [203]. A method of producing a derivative of a yeast strain of paragraph [77]-[201], the method comprising:
[0823] (a) providing:
   [0824] (i) a first yeast strain; and
   [0825] (ii) a second yeast strain, wherein the second yeast strain is a strain of any one of paragraphs [77]-[201];
[0826] (b) culturing the first yeast strain and the second yeast strain under conditions which permit combining of DNA between the first and second yeast strains;
[0827] (c) screening or selecting for a derivatived yeast strain comprising the heterologous polynucleotide encoding the transporter.

[0828] Paragraph [204]. A method of producing ethanol, comprising incubating a strain of any one of paragraphs [77]-[201] with a substrate comprising a fermentable sugar under conditions which permit fermentation of the fermentable sugar to produce ethanol.

[0829] Paragraph [205]. Use of a strain of any one of paragraphs [77]-[201] in the production of ethanol.

[0830] Paragraph [206]. A method of producing a fermentation product from a starch-containing or cellulosic-containing material comprising:

(a) saccharifying the starch-containing or cellulosic-containing material; and
(b) fermenting the saccharified material of step (a) with the yeast cell of any one of paragraphs [77]-[201].

[0831] Paragraph [207]. The method of paragraph [206], comprising liquefying the starch-containing material at a temperature above the initial gelatinization temperature in the presence of an alpha-amylase prior to saccharification.

[0832] Paragraph [208]. The method of paragraph [207], comprising adding a protease in liquefaction.

[0833] Paragraph [209]. The method of paragraph [208], wherein the protease is a serine protease, e.g., an S8 protease.

[0834] Paragraph [210]. The method of paragraph [208] or [209], wherein the protease is a bacterial protease, particularly a protease derived form Pyrococcus, Palaeococcus, or Thermococcus, more particularly Pyrococcus furiosus, Palaeococcus ferrophilus, Thermococcus litoralis, Thermococcus thioreducens.

[0835] Paragraph [211]. The method of any one of paragraphs [208]-[210], wherein the protease is selected from the group consisting of SEQ ID NO: 291, SEQ ID NO: 292, SEQ ID NO: 293, SEQ ID NO: 294, and SEQ ID NO: 295, or a variant of any one of SEQ ID NO: 291, SEQ ID NO: 292, SEQ ID NO: 293, SEQ ID NO: 294, and SEQ ID NO: 295 having at least at least 60%, e.g., at least 65%, at least 70%, at least 75%, at least 80%, at least 85%, at least 90%, at least 91%, at least 92%, at least 93%, at least 94%, at least 95%, at least 96%, at least 97%, at least 98%, or at least 99% sequence identity thereto.

[0836] Paragraph [212]. The method of any one of paragraphs [206]-[211], wherein fermentation and saccharification are performed simultaneously in a simultaneous saccharification and fermentation (SSF).

[0837] Paragraph [213]. The method of any one of paragraphs [206]-[211], wherein fermentation and saccharification are performed sequentially (SHF).

[0838] Paragraph [214]. The method of any one of paragraphs [206]-[213], comprising recovering the fermentation product from the from the fermentation.

[0839] Paragraph [215]. The method of paragraph [214], wherein recovering the fermentation product from the from the fermentation comprises distillation.

[0840] Paragraph [216]. The method of any one of paragraphs [206]-[215], wherein the fermentation product is ethanol.

[0841] Paragraph [217]. The method of paragraph [216], wherein the ethanol yield is more than 1.0%, e.g., more than 2.0%, more than 2.5%, more than 3.0%, more than 3.5%, more than 4.0%, more than 4.5%, more than 5.0%, more than 5.5%, more than 6.0%, more than 6.5%, more than 7.0%, more than 7.5%, more than 8.0%, more than 8.5%, more than 9.0%, more than 9.5%, or more than 10.0%, greater than Saccharomyces cerevisiae strain Ethanol Red® (deposited under Accession No. V14/007039 at National Measurement Institute, Victoria, Australia) under the same conditions (e.g., under conditions described herein, such as after 53 hours fermentation).

[0842] Paragraph [218]. The method of paragraph [216] or [217], wherein the ethanol yield is more than 1.0%, e.g., more than 2.0%, more than 2.5%, more than 3.0%, more than 3.5%, more than 4.0%, more than 4.5%, more than 5.0%, more than 5.5%, more than 6.0%, more than 6.5%, more than 7.0%, more than 7.5%, more than 8.0%, more than 8.5%, more than 9.0%, more than 9.5%, or more than 10.0%, greater when compared to an otherwise identical fermenting organism lacking the heterologous polynucleotide encoding the transporter.

[0843] Paragraph [219]. The method of any one of paragraphs [206]-[218], wherein saccharification of step (a) occurs on a starch-containing material, and wherein the starch-containing material is either gelatinized or ungelatinized starch.

[0844] Paragraph [220]. The method of any one of paragraphs [206]-[219], wherein saccharification of step (a) occurs on a cellulosic-containing material, and wherein the cellulosic-containing material is pretreated.

[0845] Paragraph [221]. The method of paragraph [220], wherein the pretreatment is a dilute acid pretreatment.

[0846] Paragraph [222]. The method of any one of paragraphs [206]-[221], wherein saccharification occurs on a cellulosic-containing material, and wherein the enzyme composition comprises one or more enzymes selected from a cellulase, an AA9 polypeptide, a hemicellulase, a CIP, an esterase, an expansin, a ligninolytic enzyme, an oxidoreductase, a pectinase, a protease, and a swollenin.

[0847] Paragraph [223]. The method of paragraph [222], wherein the cellulase is one or more enzymes selected from an endoglucanase, a cellobiohydrolase, and a beta-glucosidase.

[0848] Paragraph [224]. The method of paragraph [222], wherein the hemicellulase is one or more enzymes selected a xylanase, an acetylxylan esterase, a feruloyl esterase, an arabinofuranosidase, a xylosidase, and a glucuronidase.

### Deposit of Biological Material

[0849] The following biological material has been deposited under the terms of the Budapest Treaty with the National Measurement Institute, Victoria, Australia and given the following accession number:

| Deposit | Accession Number | Date of Deposit |
|---|---|---|
| Ethanol Red ® | V14/007039 | March 19, 2014 |
| MBG4851 | V14/004037 | Feb. 17, 2014 |
| MBG4911 | V15/001459 | Jan. 13, 2015 |
| MBG4913 | V15/001460 | Jan. 13, 2015 |
| MBG4914 | V15/001461 | Jan. 13, 2015 |
| MBG4930 | V15/004035 | Feb. 19, 2015 |
| MBG4931 | V15/004036 | Feb. 19, 2015 |
| MBG4932 | V15/004037 | Feb. 19, 2015 |

[0850] The strains have been deposited under conditions that assure that access to the culture will be available during the pendency of this patent application to one determined by the Commissioner of Patents and Trademarks to be entitled thereto under 37 C.F.R. § 1.14 and 35 U.S.C. §122. The deposit represents a substantially pure culture of the deposited strain. The deposit is available as required by foreign patent laws in countries wherein counterparts of the subject application, or its progeny are filed. However, it should be understood that the availability of a deposit does not constitute a license to practice the subject invention in derogation of patent rights granted by governmental action.

[0851] The invention described and claimed herein is not to be limited in scope by the specific aspects herein disclosed, since these aspects are intended as illustrations of several aspects of the invention. Any equivalent aspects are intended to be within the scope of this invention. Indeed, various modifications of the invention in addition to those shown and described herein will become apparent to those skilled in the art from the foregoing description. Such modifications are also intended to fall within the scope of the appended claims. In the case of conflict, the present disclosure including definitions will control. All references are specifically incorporated by reference for that which is described.

[0852] The following examples are offered to illustrate certain aspects of the present invention, but not in any way intended to limit the scope of the invention as claimed.

### EXAMPLES

### Example 1: Peptide Uptake

[0853] Peptide uptake for strains MBG4994 (which comprises the expression cassates for FotX and Fot2 genes; and was prepared according the breeding procedures described in U.S. Pat. No. 8,257,959) vs Ethanol Red® (Fermentis/Lesaffre, USA) was determined at 24 h (relative to time 0 h) during corn mash ethanol fermentation. Corn mash was industrially generated at an ethanol plant using Avantec® Amp (commercially available enzyme from Novozymes A/S containing an alpha-amylase and a protease). Fermentation was carried out in 125 ml flasks containing 50 grams of corn mash inoculated with 10 million cells/g, and dosed with a cocktail of glucoamylase enzymes. No urea was added to the corn mash. Tubes were incubated at 32° C. FIG. 1 shows significant improvement in uptake of tripeptide and tetrapeptides by MBG4994 compared to Ethanol Red®.

### Example 2: Deletion of a Transporter Genes from a Yeast Strain

[0854] This example describes the construction of a yeast strain containing a deletion of a gene encoding a transporter or other gene involved in nitrogen metabolism. First, a protospacer sequence was added to a CRISPR/Cas9 base vector to direct a double-strand break to the locus of interest. The plasmid created by the protospacer addition was then transformed into yeast along with repair DNA. This repair DNA is homologous to the region 5′ of the start codon of the gene of interest at the 5′ end of the repair DNA and is homologous to the region 3′ of the stop codon of the gene of interest at the 3′ end of the repair DNA. Thus, the Cas9 protein as encoded in the plasmid vector cut the desired DNA based on homology to the protospacer sequence at the locus of interest, and then the repair DNA repaired the cut with DNA lacking the coding region of the gene of interest, resulting in deletion of the gene of interest.

[0855] The CRISPR/Cas9 base vector used was pMBin369 (See FIG. 6): a yeast episomal plasmid containing a nourseothricin resistance marker for selection in yeast, an expression cassette for Cas9-NLS, and a Pmel restriction site between the tRNA promoter and the structural crRNA encoding sequence. To target a gene for cutting by Cas9, a protospacer adjacent to an NGG sequence was found for each gene of interest. A linear oligonucleotide was obtained containing the DNA sequence homologous to 5′ of the Pmel site in pMBin369 (5-ATTCCCAGCTCGCCCC-3′; SEQ ID NO: 296), the protospacer sequence as shown in Table 3, and the DNA sequence homologous to 3′ of the Pmel site in pMBin369 (5-GTTTTAGAGCTAGAAA-3′; SEQ ID NO: 297). The linear, single-stranded oligonucleotide was then added to Pmel digested pMBin369 using the NEBuilder® HiFi DNA Assembly Master Mix (New England BioLabs) per the manufacturer's instructions.

[0856] To target deletion of each gene of interest, repair oligonucleotides were designed to remove the entire open reading frame of the gene of interest. One of the repair oligonucleotides was in the forward direction of the gene of interest and contained the 45 bases just 5′ of the gene of interest, ending at the nucleotide just prior to ATG start codon of the gene of interest, fused directly to the 45 bases just 3′ of the gene of interest, starting at the nucleotide immediately 3′ of stop codon of the gene of interest. The other repair oligonucleotide was the reverse complement of the forward repair oligonucleotide. Sequences of the repair oligonucleotides used can be found in Table 4. Prior to use in yeast transformation, the two oligonucleotides for a gene of interest were annealed into a double-strand repair DNA via mixing of the two oligonucleotides together, heating the mixture to 98° C., and then slowly cooling to room temperature to allow oligonucleotide annealing.

[0857] To create the desired yeast strains with a gene of interest deleted, the CRISPR/Cas9 plasmid and the appropriate repair DNAs as shown in Table 3 were transformed into the yeast strain of interest following a yeast electroporation protocol (See, Thompson et al. Yeast. 1998 Apr. 30;14(6):565-71). Transformants were selected on YPD+clonNAT to select for transformants that contain the CRISPR/Cas9 plasmid. Individual transformant colonies were picked to a new YPD+cloNAT plate and then screened for deletion of the gene of interest using PCR with locus specific primers.

TABLE 3

| Gene Name | Plasmid name | Protospacer sequence | Repair oligos |
|---|---|---|---|
| Fot2 | pMHCT415 | 5′-ATGTAGAAAAAGGAGAACAA-3′ | 1226919 + 1226927 |
| | | (SEQ ID NO: 298) | |
| FotX | pMHCT417 | 5′-AGAAAGAAAAAGGATCTCAA-3′ | 1226920 + 1226928 |
| | | (SEQ ID NO: 299) | |
| opt1 | pMHCT419 | 5′-GGAGAATTGGGCAAGTATGT-3′ | 1226921 + 1226929 |
| | | (SEQ ID NO: 300) | |
| 0pt2 | pMHCT421 | 5′-GATGAGAAGGTATCCACAAA-3′ | 1226922 + 1226930 |
| | | (SEQ ID NO: 301) | |
| YGL114W | pMHCT428 | 5′-ACACTCCGAGCAACCATAGC-3′ | 1226925 + 1226933 |
| | | (SEQ ID NO: 302) | |
| ptr1 | pMHCT425 | 5′-TCCGTTGCTGATGATGATTT-3′ | 1226924 + 1226932 |
| | | (SEQ ID NO: 303) | |
| pt12 | pMHCT424 | 5′-GTCTTCTCCTCTTCGATGAC-3′ | 1226923 + 1226931 |
| | | (SEQ ID NO: 304) | |
| dal5 | pMHCT414 | 5′-TGGTGTCACTTCGATTTCTT-3′ | 1226918 + 1226926 |
| | | (SEQ ID NO: 305) | |

TABLE 4

| Repair | |
|---|---|
| oligo | |
| name | Repair oligo sequence |
| 1226918 | 5′-ACAACAAAAC AAGGATAATC AAATAGTGTA AAAAAAAAAT TCAAGAATAG TGGTGAGATA |
| | CACTGACATT ATTGTTATCA GAGAAGAAT A-3′ (SEQ ID NO: 306) |
| 1226919 | 5′-CAGTCTATTC CATTTGACTG AAGAAAAAAA AATTTATTAC TGAAGAATAG TCGCCACAA |
| | AGAGGATGCA AACCAATGGT GCGAAACACT G-3′ (SEQ ID NO: 307) |
| 1226920 | 5′-TACGACGTTC CATTCGACTG AAAAAAAAAA TATTTATCGC TGAAGGGCAG TTGCCATCAC |
| | AGGACGACGG AAATCCCATG GTGAGGGACT-3′ (SEQ ID NO: 308) |
| 1226921 | 5′-TGTGGCAGAA AATAACCGCA ACAATTATAT AACGTCACAG AACACTCATG AAAACATAAT |
| | AATAAACCTG CAGAGGTTCA TATCAAGTTT-3′ (SEQ ID NO: 309) |
| 1226922 | 5′-GTAGGGTTTG TTATACGCAA TATTGCTGTT GAATTATTAG AAATTCTAGA ACTTTTCTTA GAACGCTACC |
| | ATTTCTTTAT TTTTTTTGCA-3′ (SEQ ID NO: 310) |
| 1226923 | 5′-TTTATTTTTT TTTCTTTTGA ATTAGATCAC TAATAAACTC TTATATGCGT TTAATTAACT TACTGTCTTT |
| | TTTTTTTTTT TTTTAACCAT-3′ (SEQ ID NO: 311) |
| 1226924 | 5′-TCCCTAATCT TTACAGGTCA CACAAATTAC ATAGAACATT CCAATATTCA AGCCCTCTAC TATGTTTTAT |
| | AGTTGACATA TTTGTATATA-3′ (SEQ ID NO: 312) |
| 1226925 | 5′-GACTAACCGT TAAAGATTCT AAATCGGTAC TGTAAATACT TTGAAGGTAT ATAATATTTT |
| | ACTAATAAAG AATTTACAAA GTTTACAAAT-3′ (SEQ ID NO: 313) |
| 1226926 | 5′-TATTCTTCTC TGATAACAAT AATGTCAGTG TATCTCACCA CTATTCTTGA ATTTTTTTTT TACACTATTT |
| | GATTATCCTTG TTTTGTTGT-3′ (SEQ ID NO: 314) |
| 1226927 | 5′-CAGTGTTTCG CACCATTGGT TTGCATCCTC TTTGTGGCGA CTATTCTTCA GTAATAAATT TTTTTTTCTT |
| | CAGTCAAATG GAATAGACTG-3′ (SEQ ID NO: 315) |
| 1226928 | 5′-AGTCCCTCAC CATGGGATTT CCGTCGTCCT GTGATGGCAA CTGCCCTTCA GCGATAAATA TTTTTTTTTT |
| | CAGTCGAATG GAACGTCGTA-3′ (SEQ ID NO: 316) |
| 1226929 | 5′-AAACTTGATA TGAACCTCTG CAGGTTTATT ATTATGTTTT CATGAGTGTT CTGTGACGTT ATATAATTGT |
| | TGCGGTTATT TTCTGCCACA-3′ (SEQ ID NO: 317) |
| 1226930 | 5′-TGCAAAAAAA ATAAAGAAAT GGTAGCGTTC TAAGAAAAGT TCTAGAATTT CTAATAATTC |
| | AACAGCAATA TTGCGTATAA CAAACCCTAC-3′ (SEQ ID NO: 318) |
| 1226931 | 5′-ATGGTTAAAA AAAAAAAAAA AAAGACAGTA AGTTAATTAA ACG CATATAA GAGTTTATTA |
| | GTGATCTAAT TCAAAAGAAA AAAAAAATAA-3′ (SEQ ID NO: 319) |
| 1226932 | 5′-TATATACAAA TATGTCAACT ATAAAACATA GTAGAGGGCT TGAATATTGG AATGTTCTAT |
| | GTAATTTGTG TGACCTGTAA AGATTAGGGA-3′ (SEQ ID NO: 320) |
| 1226933 | 5′-ATTTGTAAAC TTTGTAAATT CTTTATTAGTA AAATATTATA TACCTTCAAA GTATTTACAG TACCGATTTA |
| | GAATCTTTAA CGGTTAGTC-3′ (SEQ ID NO: 321) |

### Example 3: Deletion of Additional Gene(s) from a Yeast Strain Already Containing One or More Deleted Genes

[0858] This example describes the deletion of an additional gene encoding a transporter or other gene involved in nitrogen metabolism in a yeast strain that contains an exisiting deletion of a gene encoding a transporter or other gene involved in nitrogen metabolism.

[0859] To remove the CRISPR/Cas9 plasmid from a deletion strain as constructed in Example 2, the yeast strain of interest was streaked for single colonies on a YPD plate. Once colonies formed, a few were picked and simultaneously patched to a YPD plate and to a YPD+clonNAT plate. An isolated colony that grew on YPD but failed to grow on YPD+clonNAT was chosen, since lack of growth on YPD+clonNAT indicated that the CRISPR/Cas9 plasmid had been lost.

[0860] The deletion strain just described was then transformed with a new CRISPR/Cas9 plasmid and annealed repair oligonucleotides, and a correctly deleted isolate was isolated as described in Example 2.

[0861] This process was used iteratively; for instance, a strain containing three deletions was transformed to delete a gene as described in Example 2 three times, with two intervening plasmid removal steps.

### Example 4: Recombinant Addition of Transporter Genes to Saccharomyces cerevisiae Yeast

[0862] The following example describes the construction of yeast strains containing an expression cassette for either Fot2 or FotX, or for an expression cassette containing both the Fot2 and FotX genes. The Fot genes were PCR amplified from yeast strain MBG4994 (either individually or as a pair) and then integrated into the X-3 locus (as described in Mikkelsen at al 2012) of the Saccharomyces cerevisiae yeast strain Ethanol Red® or integrated into the X-3 locus of an Ethanol Red® derived strain with opt1Δ opt2Δ ygl114wΔ.

[0863] To amplify the promoter, coding region, and terminator for each Fot gene from MBG4994, PCR primers were designed to amplify from approximately 1,000 bases 5′ of the gene of interest's start codon to approximately 500 bases 3′ of the gene of interest's stop codon. Flanking DNA for the X-3 locus was added to the 5′ end of each oligonucleotide to allow targeting of the amplicon to the X-3 integration site of Ethanol Red®. The resulting primer sequences are shown in Table 3. To make the Fot2 integration DNA, a PCR was performed using MBG4994 genomic DNA, primers 1229007 and 1229008 (Table 5), and Taq DNA polymerase (New England BioLabs) per the manufacturer's instructions. To make the FotX integration DNA, a PCR was performed using MBG4994 genomic DNA, primers 1229009 and 1229010 (Table 5), and Taq DNA polymerase (New England BioLabs) per the manufacturer's instructions. Since Fot2 and FotX are adjacent to one another on the MBG4994 genome, a single PCR can be used to make an amplicon containing both genes: To make the Fot2+FotX integration DNA, a PCR was performed using MBG4994 genomic DNA, primers 1229007 and 1229010 (Table 5), and Taq DNA polymerase (New England BioLabs) per the manufacturer's instructions.

[0864] To create the desired Ethanol Red® derived yeast strains with an ectopic Fot expression cassette, the yeast strain Ethanol Red® was transformed following a yeast electroporation protocol with one of the Fot containing amplicons described above and pMCTS442, a CRISPR/Cas9 plasmid for yeast with a plasmid containing Cas9-NLS, guide RNA specific to X-3, and the nourseothricin selection marker. Transformants were selected on YPD+clonNAT to select for transformants that contain the CRISPR/Cas9 plasmid. Individual transformant colonies were picked to a new YPD+clonNAT plate and then screened for integration at X-3 using PCR with X-3 locus specific primers.

[0865] To create the desired Ethanol Red® opt1Δ opt2Δ ygl114wΔ derived yeast strains with an ectopic Fot expression cassette, the yeast strain Ethanol Red® opt1Δ opt2Δ ygl114wΔ was transformed and transformants screened as described for Ethanol Red® strain supra.

TABLE 5

| Primer | Primer Sequence |
|---|---|
| 1229007 | 5′-GAAACAATAG GCAAGAAGTA GGCGAGAGCC |
| | GACATACGAG ACTAATGTGT CCGCACTGAG |
| | GCGGAAGCAT TTGAGCCATC-3′ (SEQ ID NO: 322) |
| 1229008 | 5′-TCTTGAGCTC GTCCTTTTAC TAGCATATCA |
| | ATATCCGTTT CATTGAAAAG TGGTTTGCAT |
| | CAACACAGGA TGAACAGCAT GAATGTGCC-3′ |
| | (SEQ ID NO: 323) |
| 1229009 | 5′-GAAACAATAG GCAAGAAGTA GGCGAGAGCC |
| | GACATACGAG ACTAATGTGT CCGCCATGGA |
| | AGGATGTTTT GATAAGACCG GATGACG-3′ |
| | (SEQ ID NO: 324) |
| 1229010 | 5′-CGCTCTTGAG CTCGTCCTTT TACTAGCATA |
| | TCAATATCCG TTTCATTGAA AAGTGGGCCC |
| | TTCATTATTC TTCTCAAGTC TCTGACGCG-3′ |
| | (SEQ ID NO: 325) |
| 1218018 | 5′-GTTACTGTTG TCCACAGGC-3′ (SEQ ID NO: 326) |
| 1218019 | 5′-CTTGCTGCAT GGAGACAAGT G-3′ (SEQ ID |
| | NO: 327) |

[0866] To determine if the Fot2, FotX or Fot2 and FotX insertion in the yeast genome contained the DNA sequence as expected, PCR was used to amplify the expression cassette integrated at the X-3 locus. The primers used were 1218018 and 1218019 (Table 5). The resulting PCR amplification product was DNA sequenced. The transformants differed from Fot2 (SEQ ID NO: 163) and FotX (SEQ ID NO: 164) as shown in Table 6.

TABLE 6
Protein sequence information for yeast strains with Fot2, FotX, or Fot2 and FotX expression
cassettes at the X-3 locus. The pre-fix “het_” in front of a change indicates that the change was
heterozygous (change occurred on one of the two copies of the expression cassette in the isolated
diploid transformants). Mutations without the “het_” pre-fix are homozygous.

| | | Expressed | |
|---|---|---|---|
| Strain | Background | Gene | Mutation |
| 1 | Ethanol Red ® | Fot2 | S2P, K39E, H232L, I324V |
| 2 | Ethanol Red ® | Fot2 | Al1V, E22V, N481D |
| 3 | Ethanol Red ® | Fot2 | I128N, N208D, K311E |
| 4 | Ethanol Red ® | FotX | F491S |
| 5 | Ethanol Red ® | FotX | V41I, L413L, T442S, W445C |
| 6 | Ethanol Red ® + | Fot2 | T462I |
| | ΔOPT1ΔOPT2ΔYGL114 | | |
| 7 | Ethanol Red ® + | Fot2 | Q73L, R524T |
| | ΔOPT1ΔOPT2ΔYGL114 | | |
| 8 | Ethanol Red ® + | FotX | I113T, A527V |
| | ΔOPT1ΔOPT2ΔYGL114 | | |
| 9 | Ethanol Red ® + | FotX | (no changes) |
| | ΔOPT1ΔOPT2ΔYGL114 | | |
| 10 | Ethanol Red ® + | FotX | N397K, het_F158L, het_I314T, het_M329L |
| | ΔOPT1ΔOPT2ΔYGL114 | | |
| 11 | Ethanol Red ® + | FotX | T442A |
| | ΔOPT1ΔOPT2ΔYGL114 | | |
| 12 | Ethanol Red ® + | Fot2 and | Fot2 changes: L149P, A472V |
| | ΔOPT1ΔOPT2ΔYGL114 | FotX | FotX changes: K354STOP, A471V |
| 13 | Ethanol Red ® + | Fot2 and | Fot2 changes: Y94N, N417D |
| | ΔOPT1ΔOPT2ΔYGL114 | FotX | FotX changes: K25R, L128M, L162S, Q217R, |
| | | | W333R,Y370STOP |

### Example 5: Impact of Deletion of Peptide Transporters on Ethanol and Peptide Uptake During Ethanol Fermentation Using Corn Mash Produced Industrially by a Liquefaction Blend

[0867] This example describes the evaluation of yeast strains containing a deletion of one or more genes encoding a transporter or transporters involved in amino nitrogen uptake and metabolism. Particularly, the impact on ethanol kinetics, final ethanol titer and the uptake of peptides during ethanol fermentation with an industrially prepared corn mash is compared among the yeast strains listed in Table 7.

TABLE 7
Strains used in fermentation
4994 (MBG4994)
4994ΔFOT2ΔFOTX
4994ΔOPT1ΔOPT2Δygl114w
4994ΔOPT1ΔOPT2Δygl114wΔFOT2ΔFOTX
ER (Ethanol Reda); Fermentis/Lesaffre, USA)
ERΔOPT1ΔOPT2Δygl114w

### Seed Culture

[0868] Cryo-preserved cultures of strains were first grown in liquid YPD media (Yeast extract, 10 g. Peptone, 20 g. Dextrose, 60 g. dissolve in 1 L of distilled water). Cultivation was done aseptically in a sterile 125-ml Erlenmeyer flask filled with 50 ml YPD media and inoculated with 100 μl of cryo-preserved culture. Flasks were incubated in a shaking incubator at 32° C. for 16 h with shaking at 150 rpm. The YPD grown seed cultures (40 ml) were centrifuged at 3,500 rpm for 10 min at 22° C., and the resulting cell pellet was washed and resuspended in tap water. The resuspended cells were used to inoculate the corn mash at the beginning of simultaneous saccharification and fermentation (SSF).

### Corn Mash

[0869] Industrially prepared corn mash liquefied with Avantec® Amp (commercially available enzyme from Novozymes A/S containing an alpha-amylase and a protease) was obtained from an ethanol plant. The mash contained 34.5% dried solids as measured by Mettler-Toledo HB43-S moisture balance. The mash was supplemented with 3 ppm of antibiotic LACTROL™and its pH was adjusted to 5.0 prior to use in SSF.

### Simultaneous Saccharification and Fermentation (SSF)

[0870] All fermentations were carried out in 125-ml baffled flasks with screw caps having a 0.5 mm hole. Flasks were filled with 40-50 g corn mash and inoculated with resuspended seed culture at 10 million cells per gram of mash. A commercially available glucoamylase enzyme blend (Innova® Excel L) was added to flasks at 0.06% (w/w) of dry corn solids. Fermentation was run for 52 hr, during which samples were taken periodically to analyze the residual peptides and ethanol in the fermented corn mash.

### Peptide Analysis

[0871] Samples (5 g) removed from flasks during fermentation were transferred into 15 ml conical tubes containing 50 μl of 40% v/v H₂SO₄, vortexed, and centrifuged at 3,500 rpm for 10 min at 22° C. The resulting supernatant was filtered through a 0.2 μm syringe filter. Filtered samples were stored at −20° C. prior to preparation for LCMS analysis. Peptides were derivatized using the AccQTag™ Ultra Derivatization Kit (Waters Inc) according to the following procedure: Mix 10 μl sample with 70 μl AccQ TAG Ultra Borate buffer and 20 μl AccQ TAG Ultra reagent in a microcentrifuge tube. Wait 1 minute and then add 10 μl 100 mM DTT-solution and mix. Incubate for 20 minutes at 60 degrees celcius. Cool samples. Add 5 μl iodoacetamide (500 mM). Wait 30 min for samples to cool in darkness. Derivatized samples are subsequently analyzed on a reverse phase LCMS orbitrap (Thermo Qexactive) in positive ionization scanning mode. Samples are subsequent analyzed on a Accela LC-system equipped with a reverse phase column (ACQUITY UPLC CSH C18 Column, 130 Å, 1.7 μm, 2.1 mm×150 mm) coupled to a Q Exactive Hybrid Quadrupole-Orbitrap Mass spectrometer (Thermo Scientific). The mass spectrometer was set in positive ionization scanning mode from 200 to 1500 m/z. The LC-system was setup with two mobile phases: MQ-water with 0.1% formic acid (A-eluent) and acetonitrile with 0.1% formic acid (B-eluent). The LC-flow was set to 0.25 ml/min running a standard gradient from 99% A-eluent to 65% A-eluent in 25 minutes.

[0872] All peaks are annotated (with retention time and exact mass) and integrated in a LCMS peak picking software (GeneData). Identification of peptides is based matching between observed peaks and a) a peptide database with theoretic peptides or b) a database with possible hydrolysis products of a known substrate.

### Ethanol Analysis

[0873] Samples (5 g) removed from flasks during fermentation were transferred into 15 ml conical tubes containing 50 μl of 40% v/v H₂SO₄, vortexed, and centrifuged at 3,500 rpm for 10 min at 22° C. The resulting supernatant was filtered through a 0.2 μm syringe filter. Filtered samples were stored at 4° C. prior to and during HPLC analysis. Analysis of ethanol was conducted using an HPLC (Agilent 1100/1200 series) machine equipped with a guard column (Bio-Rad, Micro-Guard Cation H+Cartridge, 30×4.6 mm) and an analytical column (Bio-Rad, Aminex HPX-87H, 300×7.8 mm) using 5 mM Sulfuric Acid as a mobile phase with a flow rate of 0.8 mL/min. Column temperature was maintained at 65° C., and ethanol was detected using a Refractive Index detector at 55° C.

### Results

[0874] FIG. 2 shows the final ethanol titers of corn mash fermentation by the mutant strains and their corresponding parent strains as listed in Table 7. Deletion of FOTX and FOT2 gens in MBG4994 does not impact fermentation performance of 4994ΔFOT2ΔFOTX compared to MBG4994, likely due to the compensating activity of other oligopeptide transporters encoded by OPT1, OPT2 and WGL114w. The triple deletion of genes encoding for oligopeptide transporters (OPT1, OPT2 and YGL114w) has a greater negative impact on ethanol fermentation kinetics and final titer of Ethanol Red® than the corresponding knockout strain of MBG4994. As shown in FIG. 2, the final ethanol titer with 4994ΔOPT1ΔOPT2Δygl114w strain is higher than the ERΔOPT1ΔOPT2Δygl114w. The difference in kinetics and final ethanol titer between the latter two strains is attributed to the presence of FOTX and FOT2 genes in MBG4994 and 4994ΔOPT1ΔOPT2Δygl114w. The additional deletion of FOTX and FOT2 in 4994ΔOPT1ΔOPT2Δygl114w strains further slows down fermentation kinetics and reduces the final ethanol titer to a level closer to that of ERΔOPT1ΔOPT2Δygl114w strain, suggesting that FOT2 and FOTX improve fermentation performance by enabling yeast to access and uptake more amino nitrogen during corn mash fermentation.

[0875] FIGS. 3 and 4 show the residual tripeptide and residual tetrapeptide, respectively, after 29 h fermentation using industrially prepared corn mash with the strains listed in Table 7. After 29 h fermentation, Ethanol Red® has greater residual tri- and tetrapeptides when compared to MBG4994, indicating that MBG4994 can uptake more tri- and tetrapeptides during corn mash fermentation. Deletion of FOTX and FOT2 in MBG4994 leads to increased residual tri- and tetrapeptides similar to the residual tri- and tetrapeptides levels with Ethanol Red®. Uptake of tri- and tetrapeptides by MBG4994 is less impacted than Ethanol Red® when OPT1, OPT2 and ygl114w genes are deleted, which may be attributed to compensating peptide uptake activities from the Fot2 and Fotx transporters. Additional deletion of the FOT2 and FOTX genes to the MBG4994-triple knockout strain (4994ΔOPT1ΔOPT2Δygl114w) resulted in the yeast strain 4994ΔOPT1ΔOPT2Δygl114wΔFOT2ΔFOTX that exhibits a phenotype (i.e. inability to uptake tri- and tetrapeptides) similar to that of Ethanol Red® triple deletion strain (ERΔOPT1ΔOPT2Δygl114w), suggesting that FOT2 and FOTX genes improve the uptake of tri- and tetrapeptides and provide MBG4994 access to an expanded range of peptides that leads to improved fermentation performance.

### Example 6: Impact of Expression of Fundal Oligopeptide Peptide Transporters (FOTX and FOT2) in Recombinant Yeast Strains on Ethanol Fermentation

[0876] This example describes the evaluation of recombinant yeast strains containing one or more heterologous genes encoding a fungal oligopeptide transporter or transporters encoded by FOTX or FOT2 which are involved in amino nitrogen uptake and metabolism. Particularly, the impact on ethanol final ethanol titer during ethanol fermentation with an industrially prepared corn mash is compared among the yeast strains listed in Table 8.

TABLE 8

| Strains | Description |
|---|---|
| MBG4994 | Parent strain |
| ER | Ethanol Red ® (Fermentis/Lesaffre, USA) |
| ER::FOT2 A | Ethanol Red ® expressing FOT2 with |
| | S2P, K39E, H232L, I324V |
| ER::FOT2 B | Ethanol Red ® expressing FOT2 with |
| | A11V, E22V, N481D |
| ER::FOT2 C | Ethanol Red ® expressing FOT2 with |
| | I128N, N208D, K311E |
| ER::FOTX A | Ethanol Red ® expressing FOTX with |
| | V41I, L413L, T442S, W445C |

### Seed Culture

[0877] Cryo-preserved cultures of strains were first grown in liquid YPD media (Yeast extract, 10 g; Peptone, 20 g; Dextrose, 60 g; dissolved in 1 L of distilled water). Cultivation was done aseptically in a sterile 125-ml Erlenmeyer flask filled with 50 ml YPD media and inoculated with 100 μl of cryo-preserved culture. Flasks were incubated in a shaking incubator at 32° C. for 16 h with shaking at 150 rpm. The YPD grown seed cultures (40 ml) were centrifuged at 3,500 rpm for 10 min at 22° C., and the resulting cell pellet was washed and resuspended in tap water. The resuspended cells were used to inoculate the corn mash at the beginning of simultaneous saccharification and fermentation (SSF).

### Corn Mash

[0878] Industrially prepared corn mash liquefied with Avantec® Amp (commercially available enzyme from Novozymes A/S containing an alpha-amylase and a protease) was obtained from an ethanol plant. The mash contained 34.5% dried solids as measured by Mettler-Toledo HB43-S moisture balance. The mash was supplemented with 3 ppm of antibiotic LACTROL™ and its pH was adjusted to 5.0 prior to use in SSF.

### Simultaneous Saccharification and Fermentation (SSF)

[0879] Fermentations were carried out in 125-ml baffled flasks with screw caps having a 0.5 mm hole. Flasks were filled with 40-50 g corn mash and inoculated with resuspended seed culture at 10 million cells per gram of mash. A commercially available glucoamylase enzyme blend (Innova® Excel L) was added to flasks at 0.06% (w/w) of dry corn solids. Fermentation was run for 53 hr, during which samples were taken periodically to analyze ethanol in the fermented corn mash.

### Ethanol Analysis

[0880] Samples (5 g) removed from flasks during fermentation were transferred into 15 ml conical tubes containing 50 μL of 40% v/v H₂SO₄, vortexed, and centrifuged at 3,500 rpm for 10 min at 22° C. The resulting supernatant was filtered through a 0.2 μm syringe filter. Filtered samples were stored at 4° C. prior to and during HPLC analysis. Analysis of ethanol was conducted using an HPLC (Agilent 1100/1200 series) machine equipped with a guard column (Bio-Rad, Micro-Guard Cation H+ Cartridge, 30×4.6 mm) and an analytical column (Bio-Rad, Aminex HPX-87H, 300×7.8 mm) using 5 mM Sulfuric Acid as a mobile phase with a flow rate of 0.8 mL/min. Column temperature was maintained at 65° C., and ethanol was detected using a Refractive Index detector at 55° C.

### Results

[0881] FIG. 5 shows the final ethanol titers after 53 h fermentation of industrially prepared corn mash by the mutant strains and their corresponding parent strains as listed in Table 8. MBG4994 produced higher ethanol titer than Ethanol Red®, and expressing FOTX or FOT2 in Ethanol Red® leads to higher ethanol titer compared to the Ethanol Red® parent strain, demonstrating expression of FOTX or FOT2 improves the performance of yeast during corn mash ethanol fermentation.

### Example 7: Efficient Utilization of Amino Nitrogen by Yeast Enables Significant Urea Reduction in Corn Mash Fermentations Without Impacting Ethanol Yield

[0882] This example describes the evaluation of yeast strains MBG4994 (which expresses FOTX and FOT2) compared to Ethanol Red® (which lacks expression of FOTX and FOT2) in corn mash fermentations prepared without any proteases with varied exogenous nitrogen (i.e. urea) concentrations. Particularly, the impact of limited nitrogen availability on final ethanol titer in a corn mash fermentation is studied.

### Seed Culture

[0883] Cryo-preserved cultures of strains were first grown in liquid YPD media (Yeast extract, 10 g. Peptone, 20 g. Dextrose, 60 g. dissolve in 1 L of distilled water). Cultivation was done aseptically in a sterile 125-ml Erlenmeyer flask filled with 50 ml YPD media and inoculated with 100 μl of cryo-preserved culture. Flasks were incubated in a shaking incubator at 32° C. for 16 h with shaking at 150 rpm. The YPD grown seed cultures (40 ml) were centrifuged at 3,500 rpm for 10 min at 22° C., and the resulting cell pellet was washed and resuspended in tap water. The resuspended cells were used to inoculate the corn mash at the beginning of simultaneous saccharification and fermentation (SSF).

### Corn Mash

[0884] Industrially prepared corn mash samples liquefied with either Avantec® Amp (commercially available liquefaction enzyme containing an alpha-amylase and a protease) or Liquozyme® LpH (commercially available liquefaction enzyme containing an alpha-amylase and no protease) were obtained from ethanol plants. The mash samples contained 34-35% dried solids as measured by Mettler-Toledo HB43-S moisture balance. The mash was supplemented with 2 ppm of antibiotic LACTROL™ and its pH was adjusted to 5.0 prior to use in SSF. The mash prepared using Liquozyme® LpH (here referred to as LpH) was augmented with 0, 200, 400, and 800 ppm urea, whereas the mash prepared with Avantec® Amp was not supplemented with any urea.

### Simultaneous Saccharification and Fermentation (SSF)

[0885] All fermentations were carried out in 15-ml flip-cap tubes with caps having a 0.5 mm hole. Tubes were filled with 4-5 g corn mash and inoculated with resuspended seed culture at 10 million cells per gram of mash. A commercially available glucoamylase enzyme blend (Spirizyme® Excel) was added to flasks at 0.04% (w/w) of dry corn solids. Fermentation was run for 68 hr. Samples were taken after 68 hours of fermentation to analyze ethanol in the fermented corn mash.

### Ethanol Analysis

[0886] To each sample, 50 μL of 40% v/v H₂SO₄ was added to the corn mash. Samples were vortexed and centrifuged at 3,500 rpm for 10 min at 22° C. The resulting supernatant was filtered through a 0.2 μm syringe filter. Filtered samples were stored at 4° C. prior to and during HPLC analysis. Analysis of ethanol was conducted using an HPLC (Agilent 1100/1200 series) machine equipped with a guard column (Bio-Rad, Micro-Guard Cation H+ Cartridge, 30×4.6 mm) and an analytical column (Bio-Rad, Aminex HPX-87H, 300×7.8 mm) using 5 mM Sulfuric Acid as a mobile phase with a flow rate of 0.8 mL/min. Column temperature was maintained at 65° C., and ethanol was detected using a Refractive Index detector at 55° C.

### Results

[0887] FIG. 7 illustrates the final ethanol titers of Ethanol Red® and MBG4994 after 68 h fermentation in corn mash with varied urea concentrations. Results show MBG4994 ethanol yield is not impacted as significantly as Ethanol Red® by urea reduction. MBG4994 requires up to 50% less urea compared to Ethanol Red® reach maximum ethanol titers. The higher ethanol yield at low urea concentrations compared to Ethanol Red® suggests the FOT genes in MBG4994 allow access to an expanded range of amino nitrogen.

The application's sequence listing, which the Patent Office published only in electronic form, follows.

SEQUENCE LISTING (321 sequences)

SEQ ID NO: 1 - DNA, 1902 bp, Saccharomyces cerevisiae
atgtcgtcgtcgaagtctctatacgaactgaaagacttgaaaaatagctccacagaaatacatgccacggggcaggataatgaaattgaatatttcgaaacaggctccaatgaccgtccatcctcacaacctcatttaggttacgaacagcataacacttctgccgtgcgtaggtttttcgactcctttaaaagagcggatcagggtccacaggatgaagtagaagcaacacaaatgaacgatcttacgtcggctatctcaccttcttctagacaggctcaagaactagaaaaaaatgaaagttcggacaacataggcgctaatacaggtcataagtcggactcgctgaagaaaaccattcagcctagacatgttctgatgattgcgttgggtacgggtatcggtactgggttattggtcggtaacggtaccgcgttggttcatgcgggtccagctggactacttattggttacgctattatgggttctatcttgtactgtattattcaagcatgtggtgaaatggcgctagtgtatagtaacttgactggtggctacaatgcataccccagtttccttgtggatgatggttttgggtttgcagtcgcttgggtttattgtttgcaatggctgtgtgtgtgtcctctggaattggtgaccgcatccatgactatcaaatattggacgacatctgtgaacccggatgtgttcgtcattattttctatgttttggtgattactattaatattttcggtgctcgtggttatgcagaagctgagttcttcttcaactgttgcaaaattttgatgatgactgggttcttcattcttggtattatcatcgatgttggtggcgctggtaatgatggttttattggtggtaaatactggcacgatccgggcgctttcaatggtaaacatgccattgacagatttaaaggtgttgctgcaacattagtgactgctgcttttgcctttggtggttcagagtttattgccatcaccactgcagaacaatctaatccaagaaaggccattccaggtgcggccaaacaaatgatctacagaatcttattcctattcttggctaccattattctactgggtttcttggtgccatacaattccgatcaattattgggttctaccggtggtggtactaaagcctcgccatatgtcattgctgttgcatcccacggtgtccgtgtcgtcccacacttcattaacgccgttattctactttccgtgctgtccatggctaactcctccttctactccagtgctcgtttatttttaactctatccgagcaaggttacgctcctaaggttttctcctacatcgacagagccggtagaccattgattgccatgggtgtttctgcattgtttgccgttattgccttctgtgctgcatctcccaaggaagaacaagttttcacttggttattggccatttctggtttgtctcagcttttcacatggactgccatttgtttatcccatcttagatttagaagagccatgaaagtccaagggagatctcttggagaattgggtttcaaatctcaaactggtgtttggggatctgcctacgcttgcattatgatgattttaattcttattgcccaattttgggtcgctatcgcccccattggtgaaggtaagctggatgcacaagcctttttcgaaaactacttggctatgccaatcttgattgcactttatgtcggctacaaggtctggcacaaggattggaaactgttcatcagggcagacaagatcgacctagattctcatagacaaatctttgatgaagaattaatcaagcaagaagacgaagaatatagggaacgtttgaggaacggaccttattggaaaagggtcgttgccttctggtgttaa

SEQ ID NO: 2 - DNA, 1830 bp, Saccharomyces cerevisiae
atgctatcttcagaagattttggatcttctgggaaaaaggaaacttctcctgattcgatatcgatacgttcctttagtgccgggaataatttccaatcatcatcaagtgagaaaacttattctaagcaaaaatccgggagtgacaaacttatacatagatttgcggattcattcaaaagagccgagggtagcactacaagaactaagcaaataaatgaaaatacgtctgatttagaggatggcgttgagtctatcacgtcggattccaagttgaaaaagtccatgaagtcgcgccatgttgtcatgatgtctttagggacaggtattgggactggtcttttggtagctaatgcaaaaggtctacattacggtggtcctgctgcgctaataattggttacatcttggtttctttcgagacgtacttcatgatccaagctgcaggtgagatggcggtaacctatccgactttaccagcaaatttcaacgcatactcctccatattcatttccaaatcatttggattcgccacagtatggctttactgtttccaatggctaacggttttgcctttagagttaataaccgcgtctatgactattcaatttgggaatgataaaataaatccggacatttatattcttattttctatgttttcttagtattcattcatttcttcggtgtaaaagcctatggtgaaacggaattcatcttcaattgctgtaaaattttaatgattgcaggtttcattattctttctattgttatcaactgtggtggggccggaaatgacggttatatcggggccacttattggcataatccaggtgcttttgcaggtgacacatcgattggtaggttcaaaaacgtttgctatattttagttactgcttacttctcctttggtggtatggaattatttgcactaagtgttcaggaacagtctaaccctagaaaatctactccggtggcagccaagagaagcatttatcgtatcgttgtgatttatcttttgactatgatcctcattggattcaatgttccatataatgatgaccaactaatgggcgcaggcggatccgctacacatgcatctccctatgtcttagccgcttctattcacggtgtgaaaattgttccacatattatcaacgctgttattttgatttctgtggtttcagtggcaaattcctctttgtatgctggtccaagactgatttgctctttggcccaacaaggctacgcacccaagtttttagattacgttgacagagagggcaggcccttgagagctcttattgtgtgttgcgttttcggcgtcattgcttttgttgcagcttcatcaaaggaagagatcgtgtttacatggttagcagctatcgcaggcttgagtgaattattcacatggacttccataatgttgtcccatctgcgattcagacaagcaatgaaagtacagggaaggtctctagacgagttgggatacaaggccacaacagggatttggggttccatatacggtgtcttttttaatattttagtctttgttgcccaattttgggtagcattggcccccttaggtaatgggggcaaatgcgatgcggaatccttctttcaaaattatttagcttttccaatatggttggccttttacttcggatatatggtttacaaccgagattttacgctattaaatcccctcgacaagattgaccttgacttccacagacgcatttatgatccagagctaatgagacaagaggacgaagaaaataaagaaaaactaaggaatatgtctttgatgagaaaagcttatcatttctggtgttaa

SEQ ID NO: 3 - DNA, 1701 bp, Saccharomyces cerevisiae
atggaaaaaagtgcagagtttgaagtaacagactctgctttatataataacttcaatacatcaacaacagcttcactaactccggagattaaggaacattctgaggaatctcgcaatgggttagttcacagattcgtcgactcattcagaagagccgaaagccaacgtttagaagaagacaatgacttggaggatggtaccaaatcgatgaaatctaataaccacttaaaaaagtcaatgaaatctagacatgttgtaatgatgtctttaggtacagggataggaacaggtcttctagttgccaacgccaaaggtttgagtcttgcaggcccggggtctttagtcatcggttacgttatggtgtccttcgtcacgtattttatggtccaagcggctggtgagatgggtgtcacttatccgacgcttccaggtaacttcaatgcatacaattcaatctttatttcaaagtcgtttgggttcgcgaccacttggttattttgcattcagtggttaactgtgctaccgttggaattgattacttcttccatgaccgtcaagtactggaatgacacaattaatgctgatgtattcattgtcattttctatgtgtttttattgtttatccacttttttggtgttaaggcatacggtgaaacggaatttatcttcaattcctgtaagatattgatggttgcaggattcattattttatcagtcgtcatcaattgtgggggagccggtgtggacggctatattggcggcaaatattggcgcgaccctggttcatttgcagaaggcagcggtgccactcgtttcaaagggatatgttatattctagtatctgcatatttctccttcggtggtattgaattatttgttctttccatcaatgagcagtctaaccctagaaaatccactcctgtagccgcgaagagaagtgtatatcgtattttgatcatttatttgctgacaatgattctaattgggttcaatgttcctcacaataacgatcaattgatgggttccggtggctccgcaacgcacgcttcaccatatgtcttggcagcctctattcacaaggttagggtcatcccccatatcattaatgctgttattttgatatcagtcatctctgttgcgaactctgccctttatgccgcaccgagattaatgtgttccttggctcaacagggctatgctccaaaatttttgaactatattgatagggagggaagacctttaagggccttggtagtgtgctctcttgttggtgtcgttggcttcgtcgcctgttctccacaggaagagcaagcatttacatggttggcagccattgcaggtttgagtgaacttttcacatggtcaggcattatgctttcacacattcgattcagaaaagcgatgaaagtccaaggaagatcacttgatgaagtcggctataaggccaataccggtatatggggttcatactatggggtttttttcaatatgcttgtctttatggcccaattttgggtcgcactgtctccaataggaaatggcggaaagtgtgatgctcaggcattcttcgagagttatctggctgccccgctatggatattcatgtatgttggatacatggtttacaaaagagattttacctttttaaacccactggacaagatcgacttggactttcatagaagaggtttacgaccctga

SEQ ID NO: 4 - DNA, 1992 bp, Saccharomyces cerevisiae
atgacgcttggtaatagacgccatgggcggaataatgagggaagctctaatatgaatatgaatcgtaacgaccttgacgatgtttcccattacgagatgaaggaaatacaaccaaaggaaaaacaaattggctctatagaaccggaaaatgaagtagaatattttgaaaaaacagtggaaaaaaccattgaaaatatggaatatgaaggtgaacatcatgcatcttacttacggaggttcattgactcgtttagaagagcggaaggctcgcatgcaaattccccagactcgagcaactctaatgggactactcctatatccacaaaagattccagctctcaattggacaatgagttgaatcggaagagctcatacatcactgttgatggtattaaacagtcaccacaagaacaagaacagaaacaagaaaatttgaaaaagagtataaagccccgtcatacggtgatgatgtccctagggactggtattggtactggtttgctggtcggtaactccaaagttttgaacaatgcaggtccgggtggtttgatcattggttatgctattatgggtagttgtgtttactgtattattcaagcttgtggtgaattagcggttatatacagtgatttgattggtggatttaatacatatcctttgtttttggtcgaccctgcacttggcttttctgttgcttggcttttttgcttacaatggctatgtgtttgtcctctagaattggtcactgcatccatgactatcaaatattggacgacatctgtgaacccggatgttttcgttgttatcttctacgtactaatcgttgttatcaacgtttttggagctaagggttatgcagaggcagatttcttcttcaattgttgtaaaattctgatgatagttggatttttcattctcgccattattattgattgtggtggtgcaggtaccgatagttacataggtagcaaatattggcgtgatcccggagccttccgtggtgatacacccatccagaggttcaaaggtgtcgttgccacatttgtcacagcagcgttcgcctttggtatgagtgaacagctggctatgactgccagtgaacaatccaatccaagaaaggctattccatcggcggcaaagaaaatgatttatagaattctgtttgtgttcttggcgtctttaacgttagttggtttccttgtaccttacacctcagatcaattgctaggggccgcaggttcagccactaaagcgtcgccctacgtcatcgctgtctcctctcatggtgttcgtgtggttcctcatttcataaacgctgtcatcctgttgtctgttctttccgttgctaacggtgccttctataccagttctcgtattttgatgtcgttggccaaacaaggtaatgcacccaaatgtttcgattacatcgatagggaaggtagacctgctgctgctatgcttgtcagtgcattatttggtgtcattgcattctgtgcctcatctaaaaaggaagaggacgttttcacctggttgttagcaatctccggtttgtctcaattattcacgtggattaccatttgtttgtctcacattaggtttagaagagctatgaaagtgcaaggaaggtccttaggagaggttggttataaatctcaagtcggtgtctgggggtcggcttacgctgtccttatgatggtgttagctttaatcgcccaattttgggttgccattgccccaattggtggaggaggtaagttaagtgcccaatcattttttgagaattatttggctatgccaatctggattgctttatacatcttttacaaagtttggaaaaaagattggagtttattcattcccgctgataaagtagacttagtttctcatagaaacatctttgatgaagaattattaaaacaagaagatgaagaatataaagagagattaagaaacggaccatactggaaaagagttcttgatttctggtgttaa

SEQ ID NO: 5 - DNA, 1860 bp, Saccharomyces cerevisiae
atggacgatagtgtcagtttcattgccaaagaggccagtccagcacaatattcgcacagtttgcatgaaagaacacacagtgaaaaacaaaagagagactttacaataacagaaaaacaagatgaggtatctggacaaacagcggagcctcgaaggacggacagcaaatccatattacagaggaaatgcaaagaattcttcgactcttttaaaaggcagctgccaccagaccgtaattccgaactagagtcccaagaaaaaaacaacctgacaaagtcgatcaaatctcgtcacttagtcatgatcagtctcggtaccggtataggtactggtttactggtcggtaatggtcaggtgctgggaacagctggtcctgccgggttagtccttggttacggaatagcatcgatcatgctttactgtatcatccaagcggcaggcgagttaggtctctgttatgcaggactaaccggcaattacaccagatatccttctattttagtcgacccttcgttgggttttgcagtttctgtggtttacaccattcaatggctaactgttctgcccttacaattggtcactgcggcaatgacagttaagtactggacgagtgtaaatgcagacatctttgttgccgtggttttcgtttttgtaattatcattaatctatttgggtccagaggctatgctgaagccgagttcattttcaattcctgtaagatattgatggtaatcggattcgtcattctggcgattatcatcaattgtgggggtgcaggtgacagaagatacatcggtgctgagtactggcacaatcctggtccatttgcccacggtttcaaaggtgtatgtacggttttctgttatgctgcattcagctacggtggaattgaagttctacttctatctgccgctgagcaggaaaacccaacaaaatctattcccaatgcctgcaaaaaagtggtataccgtattctgctgatttacatgctcaccaccattttggtttgctttcttgttccatacaacagtgacgaattattagggtctagtgactcctctggatcccatgcctccccatttgtcattgctgttgcatcacatggtgtcaaagttgtgcctcactttataaatgctgttattttgatttctgtcatttctgttgcaaactcttcgttatattctgggccaagattgttattatcattggcagaacaaggcgtcttacctaaatgcttagcatatgttgatagaaacggcaggcctttactttgtttttttgtttcccttgtctttggatgcattgggtttgtagccactagtgacgctgaagaacaggttttcacctggttattggcaatttctagtctttcgcaattatttatctggatgtcaatgtccttgtcacatataagatttagagatgccatggcaaagcaaggtcgttcgatgaacgaagttggatacaaagcacaaactggctattggggttcatggcttgcagttttaattgcaatcttcttccttgtgtgccagttctgggtagccatcgcacctgttaatgaacatggaaaacttaacgtcaaagtgtttttccaaaattatttggcaatgcccatcgttttgtttgcctattttggtcacaagatatacttcaaatcatggagcttttggattccagccgaaaaaattgatttggactcacatagaaacatatttgtgtctccatcgcttacagagatcgacaaagttgacgataacgatgatcttaaagagtatgaaaattcagaatcgtcggaaaatccaaacagttcgcgttcaagaaagttttttaagaggatgaccaatttctggtgctaa

SEQ ID NO: 6 - DNA, 1779 bp, Saccharomyces cerevisiae
atgaccgaagactttatttcttctgtcaagcgttcaaatgaggagctgaaggagcgaaaatctaactttggatttgtagaatacaaatccaagcaattaacatcatcctcatcacacaattcaaactcatcgcatcacgatgatgacaaccaacacggcaagaggaatattttccagcgatgtgttgattctttcaagtctcctctggacggctcgttcgacacaagtaatttgaagaggactctgaaaccaaggcacttaatcatgattgccattgggggcagtataggtactggtttgtttgtcggtagtggtaaggcaatcgccgaaggtggtcctcttggtgtcgtcattggttgggctattgcaggctctcaaatcatcgggacgattcatgggctaggtgaaatcacggtgcggtttcccgttgtcggggcctttgccaattacggcacaaggtttttggatccaagtataagttttgttgtttcgaccatatacgtgctacagtggttttttgtattacccttagaaatcattgcggcggcaatgaccgtacagtactggaactcgtctattgaccccgtaatttgggtagccatcttttatgctgttattgtttccataaatttgtttggtgtacgaggttttggggaagcggaatttgcattttccaccataaaagcaataacagtttgcggattcattatattgtgcgttgtcctcatttgcggtggaggtcccgaccacgagttcattggcgccaaatactggcacgaccctggttgtttggccaatgggttcccgggcgttctatctgttcttgttgttgcttcgtattctctcggtggtatagaaatgacgtgcctggcatcaggtgaaacggaccccaaaggcttaccaagtgctatcaagcaagtgttttggaggatcttatttttctttttgatatcactgaccctggtaggattcctggttccatatacaaaccaaaacttactgggtggttcatctgtggacaactcaccttttgtcattgccataaaattgcatcacattaaagccttgccctccatcgtcaatgcggtcatccttatcagtgttttgagtgtaggtaactcctgcatcttcgcttcaagtagaacgttgtgttcgatggcccaccaaggccttattccatggtggtttggttatatcgaccgtgctggtaggccgctggttggcattatggcaaattcactatttggattactagcatttctggtcaaatctggctcgatgtctgaagttttcaattggttaatggccattgccggcctggccacgtgcattgtctggttgagcatcaacctgtcacatatcagatttagactggcgatgaaggctcaagggaagtctctggatgaattagaatttgttagtgctgtcgggatttggggatcagcgtattccgctttaatcaactgtctaatcttgatagctcaattctattgttcactatggcccattggtggctggaccagcggcaaagaaagggctaaaatattttttcaaaattatctgtgtgccttaatcatgttatttatattcatcgtccacaaaatttattacaagtgtcaaacaggcaaatggtggggggttaaggcgttaaaggacatagatttggaaaccgatcgtaaagatatcgacatcgaaatagtcaagcaagaaattgccgaaaagaaaatgtacctagattcccgtccatggtacgtgagacagttccatttctggtgttaa

SEQ ID NO: 7 - DNA, 1806 bp, Saccharomyces cerevisiae
atgagtaatacttcttcgtacgagaagaataatccagataatctgaaacacaatggtattaccatagattctgagtttctaactcaggagccaataaccattccctcaaatggctccgctgtttctattgacgaaacaggttcagggtccaaatggcaagactttaaagattctttcaaaagggtaaaacctattgaagttgatcctaatctttcagaagctgaaaaagtggctatcatcactgcccaaactccattgaagcaccacttgaagaatagacatttgcaaatgattgccatcggtggtgccatcggtactggtctgctggttgggtcaggtactgcactaagaacaggtggtccttcgctactgattggatgggggtctacaggtaccatgatttacgctatggttatggctctgggtgagttggctgttatcttccctatttcgggtgggttcaccacgtacgctaccagatttattgatgagtcctttggttacgctaataatttcaattatatgttacaatggttggttgtgctaccattggaaattgtcgctgcatctattactgtaaatttctggggtacagatccaaagtatagagatgggtttgttgcgttgttttggcttgcaattgttatcatcaatatgtttggtgtcaaaggttatggtgaagcagaattcgtcttttcatttatcaaggtcatcactgttgttgggttcatcatcttaggtatcattctaaactgtggtggtggtccaacaggtggttacattgggggcaagtactggcatgatcctggtgcctttgctggtgacactccaggtgctaaattcaaaggtgtttgttctgtcttcgtcaccgctgccttttcttttgccggttcagaattggttggtcttgctgccagtgaatccgtagagcctagaaagtccgttcctaaggctgctaaacaagttttctggagaatcaccctattttatattctgtcgctattaatggttggtcttttagtcccatacaacgataaaagtttgattggtgcctcctctgtggatgctgctgcttcacccttcgtcattgccattaagactcacggtatcaagggtttgccaagtgttgtcaacgtcgttatcttgattgccgtgttatctgtcggtaactctgccatttatgcatgttccagaacaatggttgccctagctgaacagagatttctgccagaaatcttttcctacgttgaccgtaagggtagaccattggtgggaattgctgtcacatctgcattcggtcttattgcgtttgttgccgcctccaaaaaggaaggtgaagttttcaactggttactagccttgtctgggttgtcatctctattcacatggggtggtatctgtatttgtcacattcgtttcagaaaggcattggccgcccaaggaagaggcttggatgaattgtctttcaaatctcccaccggtgtttggggttcctactgggggttatttatggttattattatgttcattgcccaattctacgttgctctattccccgtgggagattctccaagtgcggaaggtttcttcgaagcttatctatccttcccacttgttatggttatgtacatcggacacaagatctataagaggaattggaagcttttcatcccagcagaaaagatggacattgatacgggtagaagagaagtcgatttagatttgttgaaacaagaaattgcagaagaaaaggcaattatggccacaaagccaagatggtatagaatctggaatttctggtgttaa

SEQ ID NO: 8 - DNA, 1812 bp, Saccharomyces cerevisiae
atgcctagaaacccattgaaaaaggaatattgggcagatgtagttgacggattcaagccggctacttctccagccttcgagaatgaaaaagaatctactacatttgttaccgaactaacttccaaaaccgattctgcatttccattaagtagcaaggattcacctggcataaaccaaaccacaaacgatattacctcttcagatcgcttccgtcgtaatgaagacacagagcaggaagacatcaacaacaccaacctgagtaaagatctatccgtgagacatcttttaactctagctgtcgggggtgcaataggtactggtttatatgtgaatacgggtgctgctttatctacaggtggtccggccagtttagttattgattgggttattatcagtacatgtctttttactgtgattaactctcttggtgagctgtccgctgcttttcccgttgttggtgggttcaatgtttacagtatgcgttttattgagccttcatttgcattcgcagtgaacttaaactatttagcacaatggctagttcttctacccttggaattagtggccgcatctattactataaaatactggaatgataaaattaattccgacgcctgggttgctatcttttatgccaccattgcactggctaatatgttggatgttaagtcatttggtgagaccgaatttgtattgtccatgattaaaatcctctccatcattggctttactatcttaggtattgttttgtcctgtggtggtgggcctcacggcggttacattggtggtaaatactggcatgacccaggcgcttttgtagggcacagctcgggaactcagtttaaaggtttatgttcagtttttgttaccgctgccttttcttattccggtattgaaatgactgctgtctccgctgctgaaagtaaaaatccaagagaaaccattcccaaggcagcaaagagaactttttggctgattaccgcctcttatgtgactatattgactttgattggttgcttggttccatccaatgaccctaggttactaaacggttcaagttcagtggacgctgcctcatctcctctggttatcgcaattgaaaacgggggtattaaaggtctaccatcattaatgaacgccattattttgattgctgttgtttccgtggctaacagtgctgtttatgcatgttcaaggtgtatggtcgccatggctcatattggtaatttaccaaaatttttgaaccgtgttgacaaaaggggtagaccaatgaatgctatcttgttaactttgttttttggtttgctttcctttgtggcagcaagtgataagcaagctgaagtctttacatggttgagtgccttatctggtttatcgacaattttctgctggatggccattaatctttcccatattagatttcgccaagccatgaaagttcaagaaaggtctttagacgaattacccttcatttctcaaactggcgtcaagggatcctggtatggttttatcgttttatttctggttcttatagcatcgttttggacttctctgttcccattaggcggttcaggagccagcgcagaatcattctttgaaggatacttatcctttccaattttgattgtctgttacgttggacataaactgtatactagaaattggactttgatggtgaaactagaagatatggatcttgataccggcagaaaacaagtagatttgactcttcgtagggaagaaatgaggattgagcgagaaacattagcaaaaagatccttcgtaacaagatttttacatttctggtgttga

SEQ ID NO: 9 - DNA, 1752 bp, Saccharomyces cerevisiae
atggatgaatttgaatctaccaaactttcgaaggttcagttttccactagcgtgttaagtacgccttcgaatgaaggaaataatctaatacacagattcaagaactctttcaagcgaaatgattcaccagcgatccaagaaggtttgctgtattcggagctttcagaggaagaaaaaatacaatgggacttagccaaccagccgtataaaaaggtcctagatcaaagacacctgaccatgatagccattggaggtactctagggacgggtcttttcattggtttaggggaatcactagcgtccggacctgcttctttgctaattggtttcttgttggtcggcgcatctatgctctgtgttgttcagtgtggggccgaactttcatgtcagtaccctgtttccggctcctatgcgctgcacgccagtagatttatagacccatcagtcggcttcagtataggaattaactacttattgatgtggctcatatcttaccctagcgagctggtaggatgttcgcttaccatctcttattgggcaccatcggtcaatcctgctgcctgggttgcaatcgcgttcgttttaagcatgctattgaatctttttggggcaagaggctttgcagaatcagagttttatatgtcaattttcaaaattgtggctctattcatttttataattattggtattgttctcattgcaggtggtgggcctgattctactggatacatcggcacgaagtattggcacgatccaggctccttcgctgttcctgttttcaaaaacctctgcaatacttttgtttcggcagcatactcctttagtggtacagaaatggttgttttaaccagcactgaagcaaggagtgtttcctcagtctctcgggcagcgaaaggtacgttctggagaattatcatcttttatattgttacagtgattataattggttgcctggtcccttataatgatcctcgtctgattagcggttcatccagtgaggatattactgcttccccgtttgttattgccttgagcaatactggtgctatgggaacaagagtgtctcattttatgaatgcggtcatcttgatagccgtattttctgtttgcaattcctgcgtttacgcatcctctagattgattcagggtttggcgacagcaggccaacttccaaagatctgcgcttacatggacaggaatggtcggcctttagttggcatggctatatgtggcgcttttggattgttaggctttttggttgtttccaagaaccagggtacagttttcacatggttgtttgcgttgtgttccatttcatttttcacaacttggttctgtatttgcttctgtcaagtcagatttaggatggcaatgaaagctcaaggaaggtcaaaggatgacattatctatagatcgacattagggatatacggaggaattttcggctgtatcttaaatgttctattggtaattggagaaatatatgtatcggctgcacccgtgggtagtcccagttctgctgctaatttctttgaatattgtatgagtattcccataatgattgctgtatatattggccatagaatttaccgcagagactggagacactggtacatcaagcggatggatattgacctcgatagcggacattcgttagaggacttcgaagccaccaagcttgagagggatgaggataagaaatacgtttcctctaagccactttactataggatctatcggtttttctgttaa

SEQ ID NO: 10 - DNA, 1168 bp, Saccharomyces cerevisiae
cattatggtactgaacttgtttggtgtgagaggctttgccgagactgagtttgctctgtcaatcattaaggttattgctatatttattttcatcattattggtatcgtccttattgccggaggggggcctaactctactggttatattggcgccaaatactggcacgacccaggtgccttcgcaaaacctgtcttcaagaatttgtgtaacacattcgtttctgctgctttttcctttggtggtagtgagttagtgctgttaactagtacagaatctaaaaatatttcagctatatcacgtgctgccaaaggtacgttctggagaatcgcgattttttacattactaccgttgtcattattggatgtctcgtaccttataacgaccccagactgctcagtggttcgaacagtgaggatgtatctgcctctccctttgttattgctttgagtaatacaggatcaatgggtgcaaaagtttccaactttatgaatgtcgttatccttgttgcggttgtgtcagtttgcaattcttgcgtttatgcttcttcaagactaattcaagctttaggtgcatctggccaacttccttcggtatgttcctacatggacagaaagggtaggcctttggttggcattgggattagtggtgcatttggtcttttaggttttcttgtggcctcgaaaaaggaggacgaggtcttcacttggcttttcgccctttgttccatttcatcattcttcacctggttctgtatttgtatgtcacaaattagatttaggatggctttgaaagctcaaggaagatccaatgacgaaatagcttacaaatccatactgggtgtttatggtggaattttggggtgtgtgctaaatgcattgctaattgcgggtgaaatatacgtatcggccgccccggtcggtagccctagctccgctgaagccttctttgaatactgtttaagtattccaatcatgattgttgtttattttgcacataggttttatcgaagagattggaaacacttctacatcaagaggagtgagatcgatctggatactgggtgttccgtggagaatctagagcttttcaaagcacaaaaagaagctgaggaacaactcattgcttctaagccattctattacaaaatctacagattttggtgttag

SEQ ID NO: 11 - DNA, 1773 bp, Saccharomyces cerevisiae
atgacaaattcaaaagaagacgccgacatagaggagaagcatatgtacaatgagccggtcacaaccctctttcacgacgttgaagcttcacaaacacaccacagacgtgggtcaataccattgaaagatgagaaaagtaaagaattgtatccattgcgctctttcccgacgagagtaaatggcgaggatacgttctctatggaggatggcataggtgatgaagatgaaggagaagtacagaacgctgaagtgaagagagagcttaagcaaagacatattggtatgattgcccttggtggtactattggtacaggtcttttcattggtttatccacacctctgaccaacgccggcccagtgggcgctcttatatcatatttatttatgggttctttggcatattctgtcacgcagtccttgggtgaaatggctacattcatccctgttacatcctctttcacagtgttctcacaaagattcctttctccagcatttggtgcggccaatggttacatgtattggttttcttgggcaatcacttttgccctggaacttagtgtagttggccaagtcattcaattttggacgtacaaagttccactggcggcatggattagtattttttgggtaattatcacaataatgaacttgttccctgtcaaatattacggtgaattcgagttctgggtcgcttccatcaaagttttagccattatcgggtttctaatatactgtttttgtatggtttgtggtgctggggttaccggcccagttggattccgttattggagaaacccaggtgcctggggtccaggtataatatctaaggataaaaacgaagggaggttcttaggttgggtttcctctttgattaacgctgccttcacatttcaaggtactgaactagttggtatcactgctggtgaagctgcaaaccccagaaaatccgttccaagagccatcaaaaaagttgttttccgtatcttaaccttctacattggctctctattattcattggacttttagttccatacaatgaccctaaactaacacaatctacttcctacgtttctacttctccctttattattgctattgagaactctggtacaaaggttttgccacatatcttcaacgctgttatcttaacaaccattatttctgccgcaaattcaaatatttacgttggttcccgtattttatttggtctatcaaagaacaagttggctcctaaattcctgtcaaggaccaccaaaggtggtgttccatacattgcagttttcgttactgctgcatttggcgctttggcttacatggagacatctactggtggtgacaaagttttcgaatggctattaaatatcactggtgttgcaggcttttttgcatggttatttatctcaatctcgcacatcagatttatgcaagctttgaaataccgtggcatctctcgtgacgagttaccatttaaagctaaattaatgcccggcttggcttattatgcggccacatttatgacgatcattatcattattcaaggtttcacggcttttgcaccaaaattcaatggtgttagctttgctgccgcctatatctctgttttcctgttcttagctgtttggatcttatttcaatgcatattcagatgcagatttatttggaagattggagatgtcgacatcgattccgatagaagagacattgaggcaattgtatgggaagatcatgaaccaaagactttttgggacaaattttggaatgttgtagcatag

SEQ ID NO: 12 - DNA, 1725 bp, Saccharomyces cerevisiae
atggatgaaactgtgaacatacaaatgtccaaggaaggtcagtatgaaatcaattctagctctataataaaagaggaggagtttgtagatgaacaatattctggggagaacgttacgaaggccatcaccacagagagaaaagtcgaggatgatgatgctgctaaggaaacagagagctcaccacaagaaagaagagaggtgaagcggaagttaaagcagcggcatatagggatgattgctctcggcggcaccattggcacgggcctcataattggtattggtccgccattggcacacgccggccctgttggtgccttgatatcgtatttatttatggggacagtgatttactccgttacacaatcgttaggagagatggccacttttatcccagttacatcttcattttctgtcttcgcccaaagatttctgtcgccagcgctgggagcgactaacggatatatgtactggctgtcgtggtgtttcaccttcgcactggaactatccgttttggggaaagttattcagtactggacagaagcagtgcctctagcggcttggatcgtgatcttttggtgcctgttaacttcaatgaacatgtttcccgtaaagtattacggagaatttgagttttgtattgcctccataaaggtcatcgcgttgcttggttttatcattttctcattctgtgttgtgtgtggtgcgggacaatctgatggacccatcggtttcaggtactggagaaatccaggagcctgggggcctggcattatctccagtaataaaaatgagggccgttttctcggatgggtttcctctttgattaatgctgcatttacgtaccaaggtactgaactggttgggataaccgctggtgaagcggctaacccaagaaaagctctcccgagggcaataaagaaagttgtagtgaggattctagtcttttacattctttcactatttttcattggccttttggtcccatataatgacccaaagttggatagtgacggtatatttgtctcttcatcgccctttatgataagcattgagaattcaggcacaaaagttctcccagatatatttaacgcagtcgtgctaatcaccattctttccgcaggtaactctaatgtgtacattggctcaagagtactgtatagtctgtctaaaaatagcttggcgccaaggttcttgtctaacgtgaccagaggtggtgttccatacttttctgttctatctacatccgtgttcggatttttggctttcttagaggtttctgcaggcagcggcaaggcctttaactggttattgaacataactggtgtggccggtttctttgcctggcttttgatttcattctctcatatccgtttcatgcaagccataaggaaacgtggtatatcgagggatgacttaccttataaagctcaaatgatgccttttttggcatattatgcatcttttttcatcgctctaattgttctgatccagggcttcaccgctttcgcacctacttttcagcctatagactttgtcgctgcatatatatcagtattcctatttttggccatatggttatcattccaagtttggtttaagtgccgcttactctggaagctgcaggatatcgatatcgattctgatcaccggcaaatagaggagttggtatggatagagccagaatgtaaaacaaggtggcaacgagtttgggatgtcctttcataa

SEQ ID NO: 13 - DNA, 1836 bp, Saccharomyces cerevisiae
atgggcaggtttagtaacataataacgtccaataaatgggacgagaaacaaaacaacattggcgaacagagcatgcaggaattaccagaagaccagatagaacatgagatggaagcaatagatccaagtaataagacgaccccatactctattgatgagaaacagtacaacacaaaaaagaagcatgggtcattgcaaggtggcgcaatcgctgatgtaaattcgataactaattcgttaacaagattgcaagttgtctctcatgaaccagatattgacgaggatgaagaagaagcccactatgaggataaacacgtgaagagagccttgaagcaaagacacattggtatgattgcactaggtggtacaatcggtactggtcttttcgttggtatctccactcccttgagtaatgctggccctgtggggtccctgattgcttacattttcatgggcaccattgtctacttcgttacccagtcacttggtgagatggctacgtttatccccgtgacatcatctatcactgtcttttcgaagaggttcttatcacctgcattcggtgtttctaacggttacatgtactggttcaattgggctattacttatgctgtggaggtttctgtcattggccaagttattgaatactggacagataaagttccattagcggcctggattgcgatattctgggtaattattactttgatgaattttttccctgtcaaagtttatggtgaatttgagttctgggtggcctctgttaaagttttagccattatgggttacttgatatatgctttgattattgtctgtggtggatcccaccagggccctatcggtttcaggtactggagaaatccaggagcctgggggccaggcatcatctccagtgataaaagtgaaggccgttttctcggatgggtctcctccttgattaatgctgcatttacgtaccaaggtactgaactggttgggatcaccgctggtgaagcggctaacccaagaaagaccgttccaagagctatcaataaagtcgtctttagaatcgtactattctatattatgtctttgttctttattggtctactggttccatacaacgattcccgtttatctgctagttctgctgttattgcatcatcacccttcgttatttccattcaaaacgctggtacttatgctcttccagatattttcaacgccgtggtgttgattactgttgtatctgccgctaattcgaatgtttacgttggttcccgtgttctttactctttagctaggactggtaacgcaccaaagcaatttggatacgtcaccagacagggtgttccatatctcggtgttgtttgcactgctgcattgggtcttttggcattcctggttgtcaataacaatgcaaacactgcatttaactggttgatcaacatttccactttggctgggttatgcgcctggttattcatctctttggcacatattaggttcatgcaagctttaaagcaccgtggtatttctcgtgatgatctgcccttcaaggccaaattgatgccttatggtgcctactacgcagccttttttgtcaccgtcatcatattcatccaagggttccaagcgttctgtccgttcaaagtttctgagtttttcacatcttacatctccttgattcttttagccgttatgttcatcggttgccagatatactacaaatgcagatttatttggaagctagaagatattgacatcgattccgacagaagagaaatcgaagcaattatctgggaagacgacgagcctaagaatttatgggagaaattctgggctgctgttgcataa

SEQ ID NO: 14 - DNA, 1884 bp, Saccharomyces cerevisiae
atggtaaatatactgcccttccacaagaacaatagacacagcgcgggagtcgtcacctgcgcggacgatgttagcggcgacggtagcggcggcgacaccaagaaggaggagaatgttgtccaggtaacggaatcaccatcgtccgggtcgcgcaataatcatcgcagcgacaatgaaaaagatgacgccatccgtatggagaaaatatctaagaaccagtccgcgtcgtccaacggcaccatccgcgaggatttgattatggacgtggacttggagaaatcgccctccgtcgatggcgatagcgagccgcacaaactaaaacaaggtttgcagtcgcgccatgtgcaactgatcgcgctgggcggcgccatcggtaccggtttgctggtggggacttcatccacgcttcatacgtgcggtcccgcggggctgttcatatcgtacattattatttccgcggtgatctacccgatcatgtgcgcgctgggcgaaatggtgtgctttttgcccggtgatggttctgacagtgccgggtcgacggccaatctggtcactaggtacgttgacccttcgttgggcttcgccactgggtggaattacttctactgctacgtcattttagtggccgccgagtgtacggcggcatccggtgtggtcgaatactggaccaccgcggttcccaagggcgtttggatcacgatctttctatgcgtggttgttatactaaacttttccgcggtcaaagtgtacggcgaatccgagttttggttcgcgtctatcaagatattatgcattgtgggactgatcattctgtcctttattttgttttggggtggtggccccaaccatgaccgtcttggcttcagatactggcaacatccgggcgcttttgcgcatcacctcacgggcggatcgctgggtaacttcacagatatctacactgggattatcaagggcgccttcgccttcattcttggtccggaactggtgtgcatgacttccgcggaatgcgcggaccagcgtagaaatatcgctaaggcttcgcgccgctttgtatggagactgatcttcttctacgttctggggacgctggccatctccgttattgttccatataatgacccaacattggtaaatgcgctggcgcagggcaaaccgggagccggctcgtcaccctttgtgatcggaattcaaaacgccgggattaaggttcttccccacattatcaatgggtgtatcttgaccagcgcgtggtctgccgccaatgcgtttatgtttgcgagcacaagatccctgttgaccatggcgcaaacgggacaggcacccaaatgtttgggcagaatcaacaaatggggtgttccatacgtggctgtgggtgtttccttcttgtgttcttgtttggcatatctgaacgtgtcttcatccacggcagacgtgttcaattggttttccaatatcagcaccatttccgggtttctgggctggatgtgcggctgcatcgcgtacctgagattccgcaaggctattttctacaatggcctctacgacagattgcctttcaagacgtggggacagccttacaccgtgtggttctctctcattgttataggcatcatcaccattaccaacgggtatgccattttcatccctaagtactggagagtagcagatttcatagctgcctacatcaccctacccatcttcctggttttgtggttcggccataagctgtatactcggacgtggagacaatggtggctccctgtgtccgagatcgatgttactacagggctagtcgagatcgaagagaaatcaagagaaattgaggagatgagattaccccccaccggtttcaaagacaagttcttggacgccttgttgtaa

SEQ ID NO: 15 - DNA, 1827 bp, Saccharomyces cerevisiae
atgaagatgcctctaaagaagatgtttaccagcacgtctcctcgtaactcttcttctcttgacagtgatcatgacgcttactattcgaaacaaaatcctgacaatttccctgtaaaggagcaagaaatctataacattgacctggaagaaaacaatgtgtcctctcgttcatccacctctacatcaccttcagcaagggacgactctttcgcagttccagatggtaaagacgaaaacacgcggttgaggaaagatttaaaggcaagacatatttctatgatcgccattggtggttcattaggtacaggtctgcttataggtacaggtaccgccttattgacgggtggtccggttgcgatgttaattgcatatgcctttgtcggccttttagtcttttacaccatggcctgtcttggtgaaatggcttcttacattccattggatggttttacaagttatgcctcacgttacgtggatcctgcattaggttttgctattggttatacttaccttttcaaatatttcatcttacctcccaaccaacttactgctgctgctttggtcattcaatattggatcagcagagaccgtgttaaccctggtgtgtggattactatattcttggttgttattgtcgctatcaatgtcgtcggtgtaaaattctttggtgaatttgaattttggttgtccagtttcaaagtcatggtaatgttgggtctaatcctgttactatttattattatgcttggtggaggtcctaaccatgaccgcctagggtttagatactggcgtgatcctggtgcgttcaaagaatattcgacggctatcactggtggtaaaggtaaatttgtttcgttcgttgctgttttcgtttacagtcttttcagttacacgggtattgaattgacaggtatcgtttgttctgaagctgagaatccaagaaaaagtgttccaaaggcaattaaattgacagtttaccgtatcattgttttttacctatgcaccgttttccttttgggtatgtgcgttgcatacaatgaccctcgtttactttccacaaaaggtaagagtatgtctgctgcggcatctccattcgtggttgccattcaaaactcaggtattgaagtcttacctcatatcttcaatgcttgtgtcttggttttcgttttcagtgcttgtaactcagatttgtacgtttcttccagaaatttatatgcgttggcaattgatggtaaagcgccaaagatcttcgctaagacaagtagatggggtgttccttacaatgctttaatactctccgtgctgttttgtggcttggcgtacatgaatgtgtcttcaggatcagcaaagattttcaactactttgttaacgttgtttctatgttcggaatcttgagttggatcaccattttaattgtttacatctacttcgataaagcctgccgtgctcaagggattgacaaatcaaaatttgcttatgtcgctcctggccaacgttatggtgcttattttgctttattcttctgcattttgattgctttaatcaaaaacttcactgttttcctaggtcataaatttgattataaaacattcatcaccgggtatattggcctgcctgtctatatcatttcttgggctggttacaaattgatatacaaaaccaaagtgataaagtctaccgacgtggatttgtacacatttaaggaaatatacgatagagaagaagaagagggaagaatgaaggaccaagaaaaggaagagcgtttaaaaagtaacggtaaaaatatggagtggttctatgaaaaatttttgggtaatatcttctag

SEQ ID NO: 16 - DNA, 2559 bp, Saccharomyces cerevisiae
atgagttctgtcaaccaaatatatgacctatttcccaataagcataatatccaatttacagattctcattcacaggagcatgatacttcgtccagccttgctaagaatgatacagacggaactataagtataccaggtagtatagacactggcattttaaagagcattattgaggagcaaggttggaatgacgctgagttatatagaagttcaatacaaaatcaaagattttttttaacggataaatacactaaaaagaagcatttgactatggaggacatgcttagcccagaagaagaacaaatatatcaggaacctattcaagatttccaaacatataacaaacgtgttcaaagggaatatgagctcagggaaaggatggaagaattcttccgtcaaaacaccaaaaatgatttacatattttaaacgaggattcattaaatcagcaatattccccgttaggacctgcagattatgttctgcccctcgatagatactccagaatgaaacacattgcctcaaactttttcagaaaaaaacttggtattcctagaaaactgaaaagaagaagccattataatcccaacgcagagggccacaccaaagggaattcttctatattgagttccactactgatgtaattgataacgccagctacaggaatattgcaatagatgaaaatgttgacataacacataaagaacacgccattgacgaaataaacgagcagggtgcatcaggtagtgaatctgttgtggaaggtggatcgttattgcatgacattgaaaaggttttcaataggtccagggcaactaggaaataccatatccaacggaaattaaaagtgcgccatattcaaatgctttctatcggggcttgctttagtgtcggattatttttaacctcagggaaagccttttctattgccgggccatttggtacactacttgggtttggactcacaggtagcatcattttagccacaatgctgtcatttacagagttatccacccttattcctgtgtcttctgggttctcaggactggcttctagatttgtagaggatgctttcggatttgcattgggctggacgtattggatttcctgtatgcttgctcttcctgcccaagtttcctcaagtacattctatctcagctattataataatgtcaatatatcaaagggagtaacagcagggtttatcacgctgttttctgcatttagcattgtagtaaatttactggatgtcagcataatgggtgaaattgtatatgttgctggaataagcaaagtgataattgcaattttgatggttttcacgatgatcatcctaaatgccggacatggaaatgacattcacgaaggagtcggttttagatattgggatagctctaaatctgtccgaaatttgacctacgggctatatcgtccaacatttgacctggctgatgctggcgaaggaagcaaaaaaggaatttcaggcccaaaaggccgatttttagctacggcatcagtaatgctaatttcaacatttgcgtttagcggtgttgagatgacttttttagctagtggggaagctataaatccaaggaaaacaattccttctgctacaaaaaggacattttccattgtactgatatcttacgtttttttgattttttcggtaggcatcaacatatacagtggcgatccaagactactatcatattttcctggtatttccgaaaagaggtatgaagccattataaaaggcacaggaatggactggagacttaggactaattgtcgcggcggtattgattataggcagatttcagtaggaacaggttattctagtccttgggttgttgcattgcagaactttgggctatgtactttcgcatctgcttttaacgcaatactgatatttttcactgctacagcagggatatcctcgttatttagttgttcaagaacactatacgccatgtctgtacaacggaaggcaccgccagttttcgaaatttgcagcaagagaggtgttccttatgtttcagtgatattctcctctttattttcagtcattgcttatattgcagttgaccaaaccgcgattgaaaacttcgacgtcttggccaatgtttctagtgctagtacgtctattatatggatgggattgaatctttcctttttgcgattctattacgccctaaaacaaaggaaggatattatatcaagaaatgattcatcatacccatataaatcgccattccaaccatatctagcgatttatggtctagttggatgttcattatttgttatatttatgggatatcctaactttatacatcatttctggagtactaaagcttttttttcagcatatggtggcctgatgtttttctttatcagttacacagcttataaggttctcggaacgtcaaagattcaaagactagatcagttagatatggacagtgggaggagggaaatggacagaactgactggaccgaacatagccaatatttgggaacatatagggaaagagcgaagaagttggttacctggctgatttag

SEQ ID NO: 17 - DNA, 1791 bp, Saccharomyces cerevisiae
atgacaaaggaacgtatgaccatcgactacgaaaatgacggtgattttgagtacgataagaataaatacaagacaataaccactcgaataaagagtatcgaacctagtgagggatggttggaaccttctgggtcagtgggtcacataaacacgatacccgaagcgggcgatgttcacgtggatgaacatgaggatagagggtcttctattgatgatgactcaaggacttacctgctatatttcacagaaactcgacgtaaactagaaaacaggcacgtccagttgattgctatttccggtgtcattggtacggcgctattcgtggcgatcggaaaagctttataccgtggagggcccgcctctttattattggcatttgctctttggtgtgttccaatactttgcattactgtgtctacagcggaaatggtctgctttttccctgtaagttccccctttttgagattagcaacgaagtgcgttgacgattcattggctgtcatggctagctggaatttctggtttcttgaatgcgtacagatccctttcgagattgtttctgttaatacaattatacattattggagagatgattattcagctggtattccgctcgccgttcaagtagttttgtatctgcttatttccatttgtgcagtcaaatattacggtgaaatggaattttggttggcttctttcaaaattatccttgcactcggcctatttacattcacgttcattaccatgttgggtggaaatcctgaacatgatcgttacgggtttcgtaattatggtgaaagtccattcaagaaatactttcccgatggcaatgatgtggggaagtcttcgggctacttccaggggtttctcgcttgcttgattcaggcatcgtttaccatagctggtggcgagtatatttctatgttagcgggagaggtcaaacgaccaagaaaagtattacccaaggcgtttaagcaggtgtttgtgagattaacatttttgtttttagggagttgtctgtgtgttgggattgtttgttcgccaaatgatcctgacttgacagcagcaattaatgaagcaaggcctggcgccgggtcttcaccttatgtcattgcaatgaataatctgaaaattagaatattacctgacattgttaatatagctttgattacagccgccttttctgctggtaacgcttacacttattgctcatccagaacattttatggtatggcattagatggctacgcgccaaaaatcttcactagatgcaataggcatggtgtgcccatttactctgtggccatatctttggtatgggctttagtgagccttttgcaactgaattctaatagtgcggtcgtattgaattggttaattaacttgattactgcctctcaattgattaattttgtcgtcctttgtatcgtctatttatttttcagaagggcttaccacgtccaacaagattcgttacccaagttgccattccgttcgtggggtcaaccatacactgctattatcggccttgtttcatgttccgcaatgattttaatacagggctacaccgttttctttcccaaattatggaacacacaagattttttgttttcgtatttaatggtgtttatcaacatcggtatatatgtgggctacaaatttatttggaaacgtggtaaagatcacttcaaaaacccacatgaaattgacttttctaaagagctaacagaaattgaaaaccatgagattgaaagctccttcgaaaaatttcaatattatagcaaagcataa

SEQ ID NO: 18 - DNA, 1677 bp, Saccharomyces cerevisiae
atggcagtccttaacttgaaacgtgaaactgtcgacattgaagagacagcgaagaaagatatcaaaccttattttgcttcgaatgttgaagcggttgatattgatgaagatcccgatgtttcaagatacgatccccagacaggagtgaaaagggcgctcaaaaataggcatatctcattgctagctttgggtggtgttattggcccaggttgtcttgttggtgcaggaaacgcactcaacaaaggtgggccacttgctttacttttaggctttagtattattgggatcattgctttctcagtgatggaatctataggtgaaatgatcactttatatccctcgggcggtggatttaccactttggctcgaagatttcatagcgatgcactgcctgcagtttgcggttatgcttacgttgttgtgttcttcgcagttttggcaaatgagtacaacactctctcctccatactacagttttggggcccacaagtccctctatatggttacatcttgatattctggtttgcatttgaaatttttcaactagttggcgttggtctttttggtgaaacggagtactggcttgcttggttgaaaatagtaggattagtagcctattatattttctcgattgtttacatatctggggatattaggaatagaccagctttcggctttcattattggaatagtccaggtgcattatcacatgggtttaagggaattgcgatagtgtttgtgttttgttcgaccttctattctggaacggaatcagttgccttggctgcaacggaatcaaaaaaccctgggaaggctgtgccacttgctgttcgacaaactctgtggagaattttagttgtttatattggaattgctgttttctatggagcaactgttccgtttgacgacccaaacctctctgcttctaccaaagtcctaaaatctcccattgctatcgccatatctcgtgctggttgggccggcggagctcatctggttaatgccttcattttgataacttgcatctccgccattaatgggtcactttatatagggagcagaaccttgacgcatttagcacatgaaggcctagctccaaaaattctggcttggaccgatcgaagaggcgttcccatccccgccatcactgttttcaacgccttgggcctaatatcattgatgaatgtgagcgttggagctgcaaatgcgtactcttatatcgttaatctttctggtgttggcgtctttattgtctggggtgtaataagttatacgcacctgagaataaggaaggcgtgggttgctcaaggaagatccatagaagagctaccttatgaagcgctattttatccgtggacgccagtacttagtctggccgctaacatttttctagcactcatccaaggatggagctatttcgtaccttttgatgcgggcaattttgttgatgcttatatccttctgcctgttggaattttattgtatattggcatatgtgtttttaagagcaatcattttagaactgttgatttgcggtcaatcaacctagacgaaggacgaagaaaagacatggaggctgatctttctgatcaagagagtagcttagcatcttcggaaacgatgaaggattataaaagtgcaacttttttcagatacctcagcaacattttcacctga

SEQ ID NO: 19 - DNA, 1725 bp, Saccharomyces cerevisiae
atgtcggaaggaagaacgtttctgtcacagttgaatgtcttcaacaaggagaactatcaattttcttcttctactacaaaaaaggaagtaagtaactcgacagtggatgctgacaacggtgcctccgattttgaggcaggccagcaatttgctacagaattggaccaaggtgaaaagcagttaggtattttgtcgtgtattgggcttatctgtaatagaatgcttggtaccggtgttttcgccgtttcctcgaccatttacacactatgtgggtctgtggggcttgcattaattatgtgggcagttggcgccattattgccatttctgggttatatgtatacatggaattcggtacggctataccgaaaaatggtggtgaaaaaaactacctggaggctattttcaggaaaccaaaattcttcattacctgtatgtatgctgcgtatattttcttcctaggttgggctgctggtaattccatcaatacagctattatgtttttaactgctgctgatactgaagtgaccaaatggaatcaaagaggtattggtgtggccgtcgttttttttgcattcctaattaattctctgaatgtcaagattggtctatatttgcaaaacattttaggtattttcaagattggtattgtcctcttcatttctattaccggttgggttgcccttggcggtggtctcaaagatggttatcaatctcacaactttcgtaatgcttttgaaggtactgaaaccgccactgcttatggtattgttaacgccttatatagtgttatttggtcgtttgtcggttactccaatgttaactatgcacttggtgaagttaagaaccctgtgagaactttgaagattgctggtcctacatcgatggtcttcttggctataatctacatttttgtgaacattgcttacttcgctgtggttccaaaagataagttaatttcttcaaaattgattttagctgctgacttcttcgatattgtgtttggcggccaagccaagagagcagcagccgcactggtcgggttgagtgccttaggaaatgttctttctgtcattttttctcagggtagaattattcaacaactaggacgtgaaggtgtgttgcccttttctaatttctttgcctcttctaagccattcaactccccaatggttggtttgtttcaacattttattgtttgtacagtaaccattttagccccacctccaggtgatgcatatttgctagtccaaaatttaatttcctacccaatgaatattattaattttgccattagcgcgggtttgctttggatatactggcaacgtagacaaggtaaaattgaatggaacccaccaattaaggccggtgtttttgttacgggatttttcacattatccaatttatacctgattattgctccttacgttccaccttcaaatggcgagtcggtgtattcaagcatgccatactggatccactgtgtaattgcttggggtattttcttctttggtggtgtttactacgttgtttgggcccaattattgccaagatggggccactacaaattggtttccaaggatgtgcttggtgaagatgggttctggagagtcaaaattgccaaagtttatgatgacactattggcgatgtcgatacacaagaagacggcgttattgaaacgaatataatcgaacattacaaaagtgaacaagaaaaatcgctgtaa

SEQ ID NO: 20 - DNA, 1641 bp, Saccharomyces cerevisiae
atggaaccgctgctttttaatagtgggaaagcaaatccctctcaagatgttttcatagatgtggaagttggtgatattaccacaaaatatggttccacaaatactggatcattcagttcgatggatactgtggaagcgcaggcgataaaggcagagacggcaagattcatggaagttccacagggaagacatttaggtgtgttctccacggttgtgttatttgtttcgaggataatggggtcaggtatatttgcagtacccagtgtgattttactgaatacaggtggtaataagctgatatattttgcgatctgggtttttagcgctgcgatcgcttttgcaggattgtatctttttctagaatttggttcctggataccgaaatcaggtggacgtaaaaacttcctcgaacggagttttgaaagacccagactattaattagtgtggtgttttcgtgttacagtgttttaactggctatgcattgacgggatctatcgtcttcggtaaatacgtgttgagcgcatttggagtcacggatgattcgtggtccaagtacgtcagcatatcatttataatatttgccgttctcattcacggtgtctctgtaaggcacggagtgtttatacagaacgcacttggtggtttgaagttgatcatgattgtcttgatgtgctttgccgggctatacacgcttttcttttataaaagcaccggtcaagttgcctgggacctcccagtaacccaagttgagaaagattctctcctgtcggtgtcctctattgctactgcctttatcagctcattcttttgtttttctggatgggatacagttcacacagttacatcagaaattaagaatcccgttaagacgttgaaggtgtcaggtcccttatcgttgataatttgttttgtctgctacacaatgatgaatgtggcatacttgaaagttttgacatatgaggaaattgttagtgcaggccccctggttggttccgtgttgtttaccaaacttttcggacccagagttggtggcaaattcattgctttttctatcgccatttctgcagcatctaatattctggttgtcatttacagtatatcaagagttaaccaggaaatattcaaagaaggttatttaccattcagtattcatatgtccaaaaattggccatttgatgcacctctaccatctatttctttatgtggctttataaccattgcttggatattgattttacccaaagagggcgaatccttcaattatctggtatcgatggatggttatggtaatcagtttttcttattattggtcgctattgggctctttatttggaggttcaaacacaagaacgaagtcccagagattcgtgcatctacttttggagtattagccattattacattatcattatacatgttgatggcaccattctttgccgaccctagcctaaacagagttgggttcctgccgccctaccaaatcatgtcattactggtaatagttgcatgcttctttttctggttagttaaattcgttttactacctaaattcttccattataaacttttacccaaaatcacttatttgcatgatgggctcattgtcacagaatgggtgaaaaagccatgtctgtgttag

SEQ ID NO: 21 - DNA, 1716 bp, Saccharomyces cerevisiae
atgagtatgtcaagcaaaaacgagaataagatatcagtagaacaaagaatatccactgatatcggtcaggcttaccagttacaaggccttgggtctaacctaaggtcgattcgctccaagactggtgccggtgaagtgaactatatcgatgctgctaaatctgtaaatgataaccaactgcttgcagagatcggttataaacaagaattaaaaagacaattttcaacattacaagttttcggtattgcgttctccattatgggtctattgccctccattgcatctgtgatgggtggtgggctcggtggtggtccagcaacattagtgtggggttggttcgttgctgcgtttttcattttactggtgggtattaccatggctgaacatgcaagttccattcctaccgctggtggtttgtactactggacgtattactatgctccagaaggttataaagagattatttcttttattattggttgctcaaactccctagcgttggcagccggtgtgtgttccattgattacggtttggctgaggaaattgctgctgctgtcacattaaccaaagatggaaattttgaagtaacgagtgggaaactttacggtatatttgctggagcagtggtggttatgtgtatttgtacatgtgttgcttctggggccattgctcgtctgcagacgctaagtatatttgccaatcttttcattattgttttattgttcattgcgctaccgattggtaccaagcatagaatgggaggtttcaatgatggtgactttatatttgggaaatatgaaaacttaagtgactggaataatggttggcaattttgtcttgctggtttcatgcctgctgtctggactattggttcctttgattcatgtgtccatcaatctgaagaagccaaagatgccaagaaatcagtccccattggtataatctcatctattgctgtttgttggattttaggttggttgattattatttgtttaatggcctgtatcaaccctgatattgacagcgttttggactccaagtacggctttgctttggctcaaataatttatgattcgttaggaaaaaaatgggccattgcatttatgtcattgatcgcattctgtcaatttctaatgggtgcttccattaccacagctgtttctagacaagtttgggcattttcccgtgataacggtttgcccctatcaaagtatattaaaagagtggattctaaatactcggtcccttttttcgctattttggctgcctgtgtaggttccttgattttaggattgttatgtttgattgatgatgccgccactgatgcattatttagtctggctgttgcaggaaacaatttggcatggagtacccctacagttttccgtttaacatcaggtagagatttatttagacctggtccattttatttgggtaaaatctggtctccaattgttgcttggacaggtgttgctttccaattgttcattattattttggttatgttcccctctcaacaacatggtattactaaatccacaatgaattatgcatgcgttattggtcccggtatctggatccttgcaggtatctactacaaagtttacaagaagaaatactaccacggtccagcaaccaatttgtcggatgatgattatactgaagccgttggtgctgatgttatcgacacaattatgtccaaacaggaaccataa

SEQ ID NO: 22 - DNA, 1857 bp, Saccharomyces cerevisiae
atgccagagtatacgctactggctgataatataagggagaatatcgttcatttcgatccgaatggtttgtttgataacttgcacaccattgttcatgaagatgacagtcaagagaacgaggaggccgagcatttcaattatgatcaggtgttggataaatcgttattgtcaagaggttctattgtcggtctcggtttaggactaatgagtcccgttttaggaatgtgcactagtatggccattgggctaattaatggtggtccgttaactataatgctaggttttttaatcagtggagtgtgtatatggttttcgtcgctttctcttggtgagattgtttcaaaatttccgatggaactgcatgttgggagtgccatgttggccccggagaaattgaaattagtatgttcgtggtacactggctggttaatgctcatagggaattggactatgagtaccagtattacttttgcaggcgctcaacttaccatttctttgattctgatgacgaactccaacctaatatccgaggcacacttgattttttacacagtcattgtattttacttagttgtgactgttgtaggcctcgtgaatttgaaatttgcaagatttattgaaacaataaacaaagtctgtgtttattggatcatatatgccattatatttattgatattcttctactagtattccacaaaggtaaatttcgatctttgaagtacgcgctatttcactttgataataatctatcagggtataaaagcgcatttctttccttcatcattggattccaacagtctaatttcacgttacaaggtttcagtatgttacctgctttagctgacgaagtcaaagttcctgagaaggatattccacgtggtatgtcgaatgcggtattgttatccgcgttctctggagtcatttttcttataccaataatgttaatcctgccagataatgatttgctttttaccaatcataaggttctaccaatagtgaacatttttacaaaatcgactgattcggtggtcttgtctttttttttagtgctcctaattttaggaaacttactgttttccggaattggctcgattactacatcttctcgtgcggtatatagttttagtcgtgaccaggctataccatactacgataaatggacctacgtcgaaccggattctcagtcaaaagtccccaagaattctgttgtattgagtatgataatatcatactttttaggtctgctagctttgatttcaacggccgcatttaatgcttttataggcgctgcagtgctctgtctttgttctgcgactttcattccgttagtcttggtgctgtttacgagaagaagagctatccgaagcgcgccagtaaaaatcaggtataagtttggttggttcatcaacattgtttctattgtgtggctcttgttatctatggtttctgtttgcctaccaacgcaagtgcctgtaactttcaaaacaatgaattatgctttaatggtgtacgtattctgcattttagttatcactggtctttatttcaaatgggggaagtataattttagattacccttggcagatgacatcaaggctccaattcccagtgatgcggaagaaactgtttttgaactagaggatagcaatgttgaacatactctaaactcgggaaccacagtgaaagagtctgtagaaaataattctgaagaaggtttcatcaaggtgcatcctaaaagtagtacagaaaatccctttgaggaaaatgaggaaaacgtgataaccgattatggtgatgagcaccatacagcagaacaagaatttgatcttgccgatgatcgtagatatgatatatga

SEQ ID NO: 23 - DNA, 1692 bp, Saccharomyces cerevisiae
atgagtattcggaatgataatgcttccggtggctatatgcagccggatcaatcttcgaacgcttctatgcacaaaagagacttaagagttgaggaggaaataaagccattggatgatatggatagcaagggtgctgtagcagcagatggtgaagttcatctaagaaagtcattttcgttgtggtcaattcttggtgttggattcggtttgactaattcctggttcggtatttctacatcgatggttgcaggtatatcttctggtggacccatgatgattgtttacggtataattattgttgccctgatttctatttgcattggtacctcgttgggtgaattatcttccgcatatccgcacgccggtggtcagttttggtggtctttgaagcttgcccctcctaagtacaaaagatttgcggcctacatgtgcggttcatttgcttacgcaggatccgtgttcacaagtgcttcaactacgttatccgttgctaccgaagtggttggtatgtacgctctgacgcaccctgaattcatcccaaagagatggcatatattcgtttgctttgaattgttgcatttgttcttgatgtttttcaactgttacggtaaatccttacctatcatttcatcttcctctctatacatttccctactatcctttttcacaattacaattactgtattggcatgttctcatggaaagttcaacgatgcaaagtttgtttttgccacatttaataatgaaacaggttggaagaacggcggtatcgcctttattgtcggtttgattaacccagcttggtcattttcgtgccttgactgtgcaacccatatggcgtttgaagttgaaaaaccagaaagagttattcccattgctatcatgggaacagtcgccattgggtttgtcacttccttttgttatgttatcgctatgttcttctctatacaagatctggacgctgtcttgtcttctacaacaggcgccccaatcttggacatttataatcaggcattgggtaataaatcaggtgcgattttcctgggttgcttgattctatttacctcttttggttgcgtcattgcttgtcacacttggcaggcaaggttatgttggtcatttgccagggacaatggtcttccattatcccgtttatggtcgcaagttaacccacacactggtgtacctttgaacgctcatttaatgtcatgcgcttggataaccctcattggcctactttatttggcttccagtacggcttttcagtccttaattacaggttgtattgcatttttattgttatcctacatcattccggttatatgtttacttgctaaaaagcgtaacatagctcatggtccattctggcttggaaaatttggatttttttcaaacattgttcttttgggttggactgtcttttctgtggtctttttttcctttccaccagttttacctgtgacaaaggataacatgaactatgtttgtgtagttattgttggttatactgcgtattcgattctttactggaaatacaagggtaagaaggaattccacgctttagaagaatctgagaacgaacaggctgaatatagtaataacttcgataccattgaagatagtcgagaattttccgttgcggcctctgacgttgaactcgaaaatgaacacgtaccgtggggaaagaagtga

SEQ ID NO: 24 - DNA, 1686 bp, Saccharomyces cerevisiae
atgaacagagtaggggcagtgttcctatttgtatatgaaagaaatttttttttgtctattgttccagatcgtcacaggacggaaataagaatgtctagttcagaaaggtcagaagtcaagtttgacaagcactttaattggtggtccctattaggtatcgcgttctcattaagttgctcatgggtcggtatctcagcgtcgatggccgttggtattgccagtggagggccactgcttatcatctatgggttgataattgctgcttttttcagtctcatgtgtggtatatctctgggagattttgctgctatcctgccaaacagcagcggtggttcattttgggttcttaaaatgttggaacaagaatcagtcactttgaaaacccctgagtacgaggacccttctgacgatgatgaagaagtgttcctcgagaattattgtcaaactttcaacgtggaagtttcttctaaatttcaaaaggtttcttccatggttgtagggttgctgaactatttcggtgccatttttactaccgcaagtatctgctcatctttgtcaatgagctgtatcggtattcataagttgttgcatccggactacgagttaaagcactggcatgtttttgtgggttacgagtgtatcaatgccgttttgacacttttcaacatttattcaactccgttgccctatatctctcagtttgggctctatacgtctctattgtctttcgccatgactttcattatttgtattgtttcaagatctgacaacaccgtagacccatggcccaaagcttctaatatatttgggagctttgataatcaaacaggctggaattcgtctggaatggcgtttgttgtcggtttggtcaatccgatctgggcatttgttggcattgactctgctacgcacatgattgatgaagtgggttatagtaagtcacgtttcttagttcccaaagttattatcactaccatcattgtgggctttgtaactagttttatttattgcgttggtttgtttttctgcatcactgaccaaacggcagtcgttgagtctattttacctatcgtagaaatattttaccaggccactggtaataggaatctcagtgtcttcctgcaatgtatgtgtatcacaacaggttttgtttcaggcattgcaagtggaacctggcaaagtcgaatcctccaatcattcgggaaaagttacgcaccattttataaagagggttccttgggaaacaaatccttgaagaagctagcagtgttgacacctgggtttaagtctccattatatgcccattttttgtcacaaatatgtgtaacgataattggctgtatatttatgggatctagtaccgctttcaacgcaattatcactgcatgcatcaccctgttactaatgtcgtacgcagttccttcttttatattcctgttcgttattaaaaaggaaaaattcattcatagaatcgagagtgacgtaaattgtgtcagcaggcctaaccgtcgtcgtatgtctatgattcctcatattatatgtattctatggaccttgttctgcctggtatttttatctttcccatatacactaccggttactgcaggaaacatgaattacacctcagtagtgtatgcagtagttttctgcattatcagcatcgttgttttccctacatgcatctaa

SEQ ID NO: 25 - DNA, 1479 bp, Saccharomyces cerevisiae
atggagagtcgaactacagggcctttaacgactgaaacctacgatggccccactgtggccttcatgatattaggtgccgccctagtattttttatggtgcccggattgggattcttgtactccggattggcaagaaggaagtctgcactagcactaatctgggttgtattaatggcgactttggtcggtatactgcaatggtatttctggggttactctctagctttttcaaagtccgctccgaataataaattcattgggaatctagattcgtttggctttagaaacgtgtacggaaaaaaattcgatgaagatgcctaccctgagctcgcgtatgcaaccttccaaatgatgttttcgtgcgtcaacttaagtattatcgctggcgccactgccgaaagaggcaggctgctaccgcacatggtttttctctttattctagctaccattggatattgtccagtgacgtattggatttggtcaccaggtggttgggcataccaatggggagtcctcgattgggcaggcggcggcaacattgaaatattaagcgctgtttccgggtttgtttactcttggtttttgggcaaaagaaatgaaaagttactgataaatttcaggcctcataatgtttcattggtcactctaggcacatccatactgtggtttggctggctgctatttaattctgcatcctcattatccccaaatttgaggtcagtttatgcattcatgaatacatgtctcagtgccattactggtgggatgacgtggtgtcttctggattacagatcggagaagaaatggtcgacagttggtctgtgctccggtatcatttctgggctggtggctgcaacgccaagctcaggctgtataaccctttacggttcacttattcaaggcattgtggcgggggtagtgtgtaactttgcgacgaagttgaaatactacgctaaagtagatgatgccatggacattctagctgagcacggggttgcaggcgtaataggactaattttcaatgccctttttggagcagactgggtcattggtatggatggcactacagagcacgagggcggctgggtaactcacaattacaagcaaatgtataagcagatcgcttacattgccgcatccattgggtacactgctgctgtaactgcaataatctgctttgtgctcggctacatacccggtatgaggctaagaatatcagaagaggcagaggaggcgggtatggacgaagatcaaattggcgaatttgcgtacgattatgtggaagtgagaagagattactatctatggggtgtagacgaagattcacaacgctctgatgtaaatcaccgggtgaacaacgctcatttggccgctgaacgtagcagtagcggtactaatagttcctcggatgggaatggagaaatgattcaatccgaaaagatcctaccaattcatcaagaagatcctgccaataggtaa

SEQ ID NO: 26 - DNA, 1500 bp, Saccharomyces cerevisiae
atgtcttacaattttacaggtacgcctacaggcgaaggaacgggtggtaactcgttgacaacagatttgaatacacaatttgacttggccaacatgggatggatcggtgtggcttcagcaggtgtgtggattatggtcccaggtatcggtttattatattctggtttatccaggaaaaagcatgctttatccttgctttgggcctcgatgatggcttccgccgtgtgtattttccaatggtttttctggggatactcattagctttctcacacaacactagaggtaacggttttattggtaccttggaattctttgggtttcgtaacgttttaggagccccatctagtgtcagttctcttcccgatatactgtttgccgtttaccaaggtatgtttgccgcagtcaccggtgccctaatgctaggtggtgcctgcgagagggcaaggttgtttcctatgatggtgttcttgtttttatggatgactattgtttattgtcctattgcatgctgggtctggaatgccgagggttggttggtcaaattgggtagcttggactatgcaggtggtttatgtgtccatttaacatctggacatggtggtctagtttacgctttgatactgggtaagcgtaatgaccctgttacacgtaaagggatgcccaagtacaaaccacattccgtcacctcggtggttttaggcacagtgttcttatggtttggttggatgttctttaacggaggctctgcaggtaatgcaactatacgagcatggtactctattatgtccacaaacttagctgctgcttgcggtggcttgacatggatggttatcgattatttcagatgcggaagaaagtggactacagttggtttgtgttcaggtatcatcgctggcctagtgggtatcaccccagccgccgggttcgtgccaatctggtcagccgttgtcattggtgtggttactggtgcaggatgtaaccttgctgttgacttaaagagtctattgcgcatcgatgatggtctagattgttactctatccatggtgtgggtggttgtattggttctgtattaactggtatctttgctgcagactatgtaaatgccactgcaggctcttacattagtccaattgatggtggctggatcaatcatcactataaacaagttggttatcaattagcaggtatatgcgctgcactagcctggactgttactgtcacatctatcttgcttctaactatgaatgccattccatttttaaaactaagattaagtgctgatgaggaagaattaggtaccgacgctgctcaaattggtgaatttacatacgaggaatccactgcttacatcccagaaccaatcagatctaaaacatcggcacaaatgccacctcctcatgaaaacattgatgataagattgtgggtaacacagacgcagaaaagaattctacgccttccgacgcttcttctactaagaacactgaccatatagtataa

SEQ ID NO: 27 - DNA, 1470 bp, Saccharomyces cerevisiae
atggctcggggtgacggacatctatggacagagacatatgatagttccacagtcgcttttatgattttaggtgccgccctggttttcttcatggtaccggggctgggctttctttattccggtttagcaagaagaaaatctgctctggctttgatttgggtagtgataatggctaccttagtaggtatactgcaatggtatttttggggctattctttagcattctctaagactgcgacgaacaacaaatttatcggcaacttggattcatttgggtttagaaacgtctatggcaaaatttcggatgattccacgtatcctgaactgatttatgccattttccaaatgatgttcatgtgtgtcgcattgagtattatagctggtgccactgcggaaagaggtaagctttttccacatatggtttttctttttgtttttgcgactttggtttactgtcccatcacttattggatttgggccccaggtggttgggcctaccaatggggggtattagactgggctggcggtgggaatattgaaatcctaagtgctgtggctggtttcgtttattcttattttctaggaagaagaaaagaaaacctcctgatcaactttagaccacataatgtttccatggtgactttgggtacttctatactttggtttggttggttgcttttcaatgctgcaagctcactgtcaccaaatatgaggtccgtatatgcgttcatgaacacttgtctcagcgccaccacgggtggaatgacgtggtgtttattagattatcgatctgaaaaaaaatggtccactgttgggttatgctccggcattatctgtggtttagttgctgccacgcctagctcgggttgtattactctatatggctctttgatccaaggtataatagcgggtgttgtttgtaattttgcaacaaaaataaagtattatttaaaagtggatgattccttagatctattagctgaacacggtatcgccggtgtggtgggattgatttttaacgctctatttgcagctgattgggttattggaatggacggcacaacaaagcataagggtggttggttgacgcataactggaaacaaatgtatattcaaattgcctatatcggtgcctctgccggctattgtgctgtggtcacggccatcatttgcttcgtattaggtaaaattccgggtgtccatctaagagtcactgaggaagccgaagcattggggttggatgaagatcaaataggcgaattcgcttacgattacgtggaggttaggagagattattaccagtggggtgtagatacagatgcacttcatactacatgcaatggcgctaattctgcgtctgagacaaatcctactgaggacagccaaaactcctcattgtcatcagctacagtaagcggccaaaacgaaaaaagtaataatcctaaattgcatcacgcaaaagaagcatga

SEQ ID NO: 28 - DNA, 1632 bp, Saccharomyces cerevisiae
atgtcagcggatgctagtacaaattcgaatgcttccctagacgaaaaaaatttaaacatcacttcagaagctgaaatcaagaatgaagacgtaaccgcggagccagttctaagcacggtactatcacccaacggtaaaattgtctacatcagtgacaaggttgatgaggccatgaagttggctgaagaagccaaagaaatcgaagtgacaccagaagaagatagaaaacttcgttggaagatcgactattgtatgtttcctttgatgtgtatattgtatgctgttcaatttatggacaagatttccactagttcagcggcggtcatgggattaagaactgacttgaaaatgcatggtgaccagtattcatgggttacttccgccttttatttcggctatctatttatgaacctaggcccggtacagttcattttccaaaggaccagtcacatgtcaaaaatgcttgcggtttttattgtcatatggggaatgttattagctttacatgcagctccaacagttaagtatccttctttcattgttttgagagtacttttaggttgcgcagaaagtgttgtcacaccttgctttaccattatcactgctcaatactggaagacagaggaacaattcacaagagtatcaatttggtttggtatgaacggtcttggctccatcctgatcaacgcaattgcgtacggtgtttacattcaccaggattcttatgctattaaaggctggagaaccttatttgtcattactggtgtgataacaatcttcattggtatcttgatattcctgtggatccctgacgatccatcaaaagcaaggtttttatctaaaagagagaaattaatggttgtccaaagaattaggtctaaccaacaagggttcggtaatcacgagatcaaaaaataccaaattatagaggcgttgaaggatgttaggacgtggttatatttcctctttactgtgagctctaatattcctaatggtggtatttcaagttttatgagtattctattgaatagtgattttggatattcatcaaaggaaaccctattaatgggtttacctacaggtgctgttgaattggtaggttgtccactttttggtattctagcagtttatgcagccaataagaagataccattttggaaatataagttgagttgggctatttttgcagctgtcttagcattgattgctagctgcatgttagggtttgcaacaaactccaaaaaagcaagactggctggtgcttacctgtggtacatctcgcccgtctcatttatttgcgtactttccaatatcagtgcgaattcctcgggatatagtaaaaaatggactgtatcttcaataaacttagtagcatatgctgcagctaacttggcaggaccacaaacctttattgctaagcaggctcctaaatatcatggcgctaaggtcgctatggtcgtatgttatgctgttatgatcgtgcttctatctatactgctcatcgtcaatttaagggaaaacaagagacgtgataagatagctgccgagagagggttccctgaagaaacagagaatttagagttttctgatttgactgattttgaaaatccaaatttcagatacactttatga

SEQ ID NO: 29 - DNA, 1596 bp, Saccharomyces cerevisiae
atgtcaaaagttgacgtaaaaattggagcagactcgatctcctcttctgatgaaatcctagttccttcgagactcgctgatgttacgctagcattcatggaggagaatgacgcagcagttccagaaatcacgcctgaacaagaaaaaaaattaaagagaaagctttttctcacaatattcacctttgtctctgccattaaccttttactttacatggacaaagccactttatcctatgattcgattctaggcttctttgaagatacaggtcttacccaaaatacttacaatactgtaaatacgctgttttacgttggttttgcaatcggccaatttcctggacaatacttggctcaaaagttaccacttgggaaattcttgggtgggttgttggccacatggactatacttattttcctaagttgtaccgcatacaacttttccggtgtcgttgcgttgagatttttcttggggctaacagagagtgttgttatcccgatattaattaccactatgggtatgttcttcgatgcttcagaaagagctgctgctcagccatttttctttgcagcatgtatggggtctccaattccaactgggtttattgcttatggtgttcttcatataacaaatcccagcatttcgttatggaaaatattcactatcatcattggtggtttgacttttatcatgacggttgttgtaattctgtggtttcctaataatcctgctgatgtgaaattcttttcaatacaagaaagggtatggattatcaggagagttcaggcatccacaggctcttccattgaacaaaaagtcttcaaaaagagtcaattcagagaggcaatgaaagattatataacctggttatttggattgttttttcttcttcaacagttagccaacaatctgccctatcaacagaacctgctatttgaaggaatgggtggagttgatgctctaggttcgacattggtatcagttgccggtgctggtttcgccgtcgtttgtgccttcatcgctacgttgatgttagcaaaatggaaaaatatttcagctttaacagccatcttttggactttaccagcattggtgggatccatcgctgcagctgctttaccatgggacaataagattggtatcttagcaaatatctgtatggcaggacaaatatttggtattccttttattatagctcttagctgggcaagttcaagtgcatctgggtacaccaaaaaactcacaagaagttcggtgtccttatttgcgatgggaattgctaatatcatatcaccacaaatatggagagagaaggactctcctcgctttttacctgcctggattgttcaaatcgttttatcattctctcttgcaccagccattttgttactgatccatttcatactaaaaagaaggaataatcaaagactaaaaaattatgacgaaaatttacaaaattatttggacagaattcaactcattgaaagcgaaaatccttcttccattgaagaagggaaagtggtaacccacgagaacaatttggcagtctttgatttgactgatttagaaaacgaaacttttatatatcctttgtaa

SEQ ID NO: 30 - DNA, 1605 bp, Saccharomyces cerevisiae
atgagcaacaaatttacaatggagtcacctaagcatttggtggatgatgtgcttttcatatcacccaccaatgatggatcagaagaaaagcctacggaagtcacgttccaggaagatgaaggccatgacgctagcttgcataatcgcagccatgacaagaagtcggaacttgccaccgaacgggaaattatggctactaccacggatgatgacggcatcccctccccttcccatccaatggaaaagcgtgtcttgcgcaaaatggatatatacttgattcctcttatggggatgctatatttcctttctaacctggataaatcgaatattggtaacgcagaagttgcaggtctatccaaggatatccaccttgtaggaacgcaatataacacatgtgtcacagtttttttcgcgacgtatgttcttttcgaccccataggtactaaccttctgaaaattatgggtccgccattaatgatgagtatctgtttgacctgtttcggtgctatttcgctcggaactgcttgggttaagaattatgctcaattgatcgttgtcagactactactgggtgcctttgaaggtatgatttatcccgctattaacatgtacctttcagtctgctatagaagagaacaatatgctctgaggttcgcttttgtcttcagtgcagcctgtttgtcttcatcttttggtgggctgattgcttatggttgttccaaaatcagcggttctctaaaggactggcaatacatttacattgtcgaaggttgtatctctttggggttcgtaccattctatgccttcgggttgagcaaaaatttggaggattcgtggtttttcaataaggaggaaaaagagtacatttccgaaagatacaagactatgaacacttttgacccggacgaaaaatttgaatggttccaagtgtggcaagcagttaaggatgtcaagacttgggctagtgctgtggcattattcggtatcgatttgactacttttggtctaacagtcttcttgccgatcatcattaccagtatggggttcactaatgtcagagctcaattaatgaccgtgcccatctatttccttacagcaattgtgttcttcatttgtgccgtttggtctgatcgtataaagttgagatctccattcatcctgggtgcttgtctgacgacttcgataggcatagctatcgtccttggttctcaagttcatggtgtgagatattttggcgtttacattctttgtatgggtatttacgttaatgctgcctgtaactgtttatggttaagtggtaacactggtaattacttcaagagagccaccgctttaggaattaatctatttttcgggtctggttcagggttggtctctggtcaaatttttgttgccaaagacaagccaagatatatcaaagggctgtcgattagtctggcctttcaagtcttctccatatttatgacggttgtgcaaattttcctatacaagagggaaaacgataaaaagaaagcaataatagatcgctgtaatgaattgggagagcctattccatacgacgaaaggttaagcgacaaaaaccctgagtttaagtacatgtattag

SEQ ID NO: 31 - DNA, 1782 bp, Saccharomyces cerevisiae
atgacaatttcgaataaatcgtggaggagctacttcccacatttgagaaaactacccgaagatgatcagtacttatactcagacgatactaactccagtatcatagctgaagaggagctacatcatagcgtagataagtcctcgaagacagacgttacggcagaaactacagctgtagaacctcatcctcacaatttaaggcatgacttgccatatgaagtgagagatgaagctgggcgtaaatggtggaaatattttgatgaattcgagtatcgtgttaataaggaatacaagaaatcacgtaagtggtacgagtttttgtatcctaatcatactactcaaaccaaggctgaaagacggcttctttacaagctagacattattattgctttatacttttttatgttatgttggtccaagtcagtggatttgaataactacactaacgcatatgtttccaatatgaaggaagatttaaacatgaaaggtaatgattacgtttacacttctactattgctaatgttggtgccattgtcttccaattaccatttatgtatttgttaccaagatttccctctcatattattttgcctgtaatggacttgggctggacttggttcacatttgcatgttatagggcaaactcactagccgaactaagggcttacagatttattttaagtgcctttggcgctgcttactacccagtgtcccaatatatactaggttgttggtatgccccagatgaaattaattcaagagtctgtttattcttttgtgggcaacaattgggttccgtgacttcaggacttctgcaaagtcgcatattcaaaagtttgaacggcgtccatggtctagcaggctggagatggatgtttctgatcgatgccattgcaatttctcttcccacggctattattggtttttttgttattcccggtgtaccatctaagtgttactctttatttctgactgacgaagaaatacgaattgcaagggccagaaataagaggaaccaaatcaaagatggtgttgataaaagtaagctagccccattatggagcagaaaactttggaagaaagtattttgtactccagcattctgggtacttgttgtttttgatacatgttcgtggaataacatgactgcgtatagtggttcatatactttgtggttaaagtctaatacaaagtactccattgcccaagtgaacaacctgagtgttatacccgcatgtttaggatttgcgtatgtgattttttgtgcctttggtgccgatttatttagatgtaagtggatattcatggtttttgctgctataatgaataccgtttcttgtgccttacttatcaagtgggatattccttcgaaagctaaatggtacgctttcttcaccacgtatttcagtgtggccgcatcgccttgtctatggtcgtttattaatgacttcttaaggtttgatcctcaggtgaaggctattacatggatcgccatttattccttctctcaatccacttacgcctggattcctaccttggcgtggcctaccgtggagtcaccacgttttaagactggttacaccgtgagcttaatttttggtgctatttacggtttatggacgtttgttgtactttttttttacaagagaaacgaaaagaaacatgctctaggtaatggtatcatcttgtatgatagtaataagggtgaagagcttccagaatttgtaaagaaaaatatggaggaaagagatggttactactatttaaagcggtcctcgtag

SEQ ID NO: 32 - DNA, 1539 bp, Saccharomyces cerevisiae
atgatgaaggaatcgaaatctatcactcaacatgaggttgagagagaatctgtttcttccaagcgtgccattaaaaagagattacttctgtttaaaatagacttgtttgtgctatcatttgtttgcttgcaatactggattaattatgtcgaccgtgtcggtttcaccaatgcatatatatccggtatgaaggaagatcttaagatggtcggaaacgatttgaccgtgtctaacacagttttcatgattggttacattgtaggtatggtccccaataatttaatgttattgtgtgttccgcccaggatatggctaagtttttgtacgtttgcttggggtttattgaccttgggaatgtacaaagttacatcgttcaaacatatttgcgcaattagattctttcaagccttatttgagagttgcacattttcaggaacacattttgttttgggttcgtggtataaagaagacgaattgcccattagaagtgctatttttacaggtagcggtttggtgggatctatgttcagtggatttatgcaaacaagtatctttactcatttgaatgggcggaatggcttggcgggttggagatggttattcattattgatttttgtatcacattacccattgcaatttatgggtttattttcttccccggccttcctgatcaaacaagtgctgttagcaaattttctatgacgagatacatttttaatgaacaagagctacattatgctaggagaaggctccccgctagggacgaaagcacccggttagactggtcgactattcctagagtcttaaaaaggtggcactggtggatgttctctcttgtttgggttctgggaggtgagaacttgggtttcgcatctaattctacatttgcattatggttacaaaaccaaaaatatacgttggcgcaaagaaataattatccttcggggatatttgccgtaggtatagtttctacgctttgttctgctgtatatatgagtaagatcccaagagctaggcattggcatgtttctgttttcatatcattggtaatggttattgttgcggtactaatacgtgcagacccactaaatccaaaagtcgtcttttctgcacagtatcttggaggcgtagcatacgctggacaagcggtttttttttcgtgggcaaacattatttgtcatgcagatcttcaagaacgtgctatcgttcttgcttccatgaatatgttttcaggggccgttaacgcatggtggtctatattattctttgcttcagatatggtgcccaagtttgagagaggttgctacgccctcttggctacggcaatatcaagcggaattgtctcggtcgtcatacgctcactacagataaaagagaatttgtctaagaaacaggttccttatatagatgctaatgacatgcccggagaagatgacgatgacgacaaccaggataatgaaaatgatggcgacgacgagagtatggaagttgaacttcataatgaggaaatggccgaaatttcaaatcctttccgatag

SEQ ID NO: 33 - DNA, 1782 bp, Saccharomyces cerevisiae
atgtattcaattgttaaagagattattgtagatccttacaaaagactaaaatggggttttattccagtaaagcggcaggtggaagacctgccagatgacttaaattcaacagaaattgtcactatctccaacagtatccagagtcatgaaacagctgaaaatttcatcacgactacaagtgaaaaagatcaactacattttgagactagtagctatagtgaacataaagacaatgtgaacgttactagaagttatgaatatagagatgaagccgataggccatggtggagatttttcgatgaacaagagtatcggatcaatgaaaaggaaagatctcacaataaatggtatagttggttcaaacagggtacctctttcaaagaaaaaaaattattaattaaattggatgtccttttagccttttattcttgtattgcttattgggtgaaatatctggatacggttaatataaacaacgcttacgtttcgggaatgaaggaagatttaggctttcaaggtaatgatttggtgcatactcaagtaatgtacacagttggtaatattatatttcaattgccatttttgatttacctgaacaagctcccattaaactatgttttaccaagcctcgacttatgttggtcgcttttaaccgttggtgctgcatatgtcaattctgtaccacacttgaaagcaattaggtttttcattggggcttttgaagcgccaagttatttggcataccaatatttgtttggttccttttacaaacatgatgaaatggtgcgtcgttctgctttttactatttgggccagtatatcggtattctatccgctggtgggatccagtcagccgtatattcatcgttaaatggtgtaaatggtttagagggatggagatggaactttattattgacgctattgtgtctgtcgtagtgggccttattggattttactccctgccaggtgacccatacaactgttattctattttcttaactgatgatgaaattaggttggcgaggaaaagattaaaagaaaaccaaacaggtaaaagtgattttgaaacaaaagtattcgatattaaactgtggaaaacaattttcagtgattggaaaatatacattttaactttatggaatattttctgttggaatgacagtaatgtttcatctggggcatacctactatggttgaaatctttgaaaagatactctattcctaagctcaatcagttatccatgattactccgggtttaggtatggtttatttgatgcttactggtattattgcagataaattacactctcgttggtttgcgattatttttactcaggttttcaatatcattggtaactccatattagccgcttgggacgtcgcagaaggagccaaatggtttgcatttatgctgcaatgttttggttgggctatggctcctgttttatactcttggcaaaacgatatttgtcgccgagatgctcaaactagagctattactttagttacaatgaatattatggctcaatcatctaccgcatggataagtgttttggtttggaaaacagaagaagctcccaggtatttaaaggggtttactttcactgcatgttctgctttttgtctctccatttggacttttgttgtactctacttctataaacgtgatgaaaggaacaatgccaagaagaacggtattgtgctttataactctaaacatggtgtggaaaagccaacgtcaaaagacgttgaaaccttatcagtatctgatgaaaaataa

SEQ ID NO: 34 - DNA, 1902 bp, Saccharomyces cerevisiae
atgccagacaatctatcattacatttaagcggctcttcaaaaagattgaactctcgccaacttatggaatcttccaatgagacctttgcgccaaataatgtggatttggaaaaagagtataagtcatctcagagtaatataactaccgaagtttatgaggcatcgagctttgaagaaaaagtaagctcagaaaaacctcaatacagctcattctggaagaaaatctattatgaatatgtggtcgttgacaaatcaatcttgggtgtttctattctggattcatttatgtacaaccaggacttgaagcccgtcgaaaaagaaaggcgggtttggtcctggtacaattattgttacttctggcttgctgaatgtttcaatatcaacacttggcaaattgcagctacaggtctacaactgggtctaaattggtggcagtgttggataacaatttggattgggtacggtttcgttggtgcttttgttgttttggcctctagagttggatctgcttatcatttgtcattccctatatcatctagagcatcattcggtattttcttctctttatggcccgttattaacagagtcgtcatggccatcgtttggtatagtgtccaagcttatattgcggcaactcccgtatcattaatgctgaaatctatctttggaaaagatttacaagacaaaatcccagatcactttggatcaccgaatgctactacttacgagttcatgtgtttttttatcttttgggctgccagtcttccatttttactggttccacctcacaaaattagacacctgtttactgttaaagccgtcttggttccgtttgcttcttttggtttcttaatttgggctatcagaagagctcacgggcgtattgccttaggatctttaaccgatgtacaacctcatggctctgccttttcgtgggcttttctaagatcactaatgggttgtatggctaatttctccacaatggtaatcaacgctccagatttctctagattttcaaaaaaccctaactccgctttatggtcccaattagtgtgcattccatttttgttttccatcacttgtttaattggaattctagtcaccgcagctggttatgaaatatacggtattaattactggtcgccactcgatgtgctagaaaaatttttacagactacttataataagggcacaagagctggtgttttcttaatctcttttgttttcgccgtagctcagttaggtactaatatttctgcaaactcattatcgtgtggaactgatatgtccgctattttccccaagtttatcaatatcaagcgtggttcattattttgtgcagccatggcgctgtgtatttgtccatggaatttaatggcaacatcaagtaaatttacaatggctttgtccgcatatgctatctttttgtccagtattgccggtgttgtctgctcagattactttgttgttagaagaggatatatcaagctaacacacatatattcccatcaaaagggctctttttatatgtacggaaacaggtttggtatcaattggagagctttggctgcatatctatgtggggtggctccttgcttgcccggtttcatcgcggaggtgggcgctcccgctataaaggtttctgatggagctatgaaactatattacctaagttactgggtaggatatggcttgagtttttcttcttatactgctctgtgttacttcttccctgtacctgggtgccctgttaacaacattataaaggacaagggctggttccaaagatgggccaatgtcgatgattttgaagaagagtggaaagacacaattgagagggatgacctggtagatgacaatattagtgtctacgaacacgaacacgaaaagactttcatttaa

SEQ ID NO: 35 - DNA, 1908 bp, Saccharomyces cerevisiae
atggctaacgacgctctaagtgctattttcagtaatccttcgaggaaaggtgtccaaccctccacatctattgtgtcatatacaaacaatgaagatgatattatagatgtggaaaatgggaagttcaacaagaacaagaatatcaacactaatgtgtatgtggacaactcctcaatagaggagagcgaagtcgtgcccttgcccgaaacaaagtccatctggagtaaaatatactacgatttcattgtgttagacaagacaactttgaatgtttcgttgaaagagtcgttcttgtataacagagacttgaaaccggttgaagaagaaagaaggtgttggtcctggttcaattacttatatttctggctggcagactgtttcaatattaacacatggcaaatagctggtacaggtctacaactaggtctgaattggtggcaatgttggcttacagtttggatcggctacacttttgcaggtatcttcgtagtattgaactcgagatttggttccgcatatcacttatctttccctattactgttagggcctcatttggtatattcttttctatgtggccgattataaatcgtgtcgtgatggctatagtatggtatgccgtgcaagcctggttaggtgcaacgcccgtggcactgatgctaaaatctatttttggcaagaatctggaagatagaatcccaaaccattttggttctccaaatagcactacttttgaattcatgtgtttctttatattttgggtggtcagtataccatttgtcctagtggctcctcataaaatcaggcatttattcacagtaaaagcagctttgatccccttcgcagcctttggatttttaatctgggctttgaagaaatcgcacggtaaaattgagttggggacgctgaatgattattcacctcatggttccgaattttcatggatattcgttagatccctaatggcctgtgttgctaactttgccgctttgattatcaacgcccctgacttcggtagatttgccaaaaatcctcaagcgtctttgtggccacaattggttgccatcccattgttcttcgccataacatgtttgatcggtatcattgttactgcggccggttatcacttatatggggttaactattggtcaccactggatgtacttggtcaatttttggagaccacttacaccagaggtactagggctggtgtgttcttgatttcttttgtatttgccttagctcaactgggtacaaacatttctgccaactctctggcatgtggtgctgatatgacggctttgtttccaagatatattaatattagaagaggttctttattctgtgtggcaatggctctatgtatctgtccatggaacttaatggccagttcaagtaagttcaccagcgctttgggtgcttatgcaattttcctttccagtattgctggtgtcatttgcgcggattatttcgtagtaagaagaggatatgtgaaattaacacatttattcctggcacagaagggttccttttacatgtttggaaacaaatttggtgccaattggagggcctttgttgcgtatatttgcggtatcgctccaaatttaccaggttttataggtgatgttggagctccaaaaattacggtttcagagggtgcaatgaggttatactatttaggttatccggtaggtttctttattagtgcggtgatatacctcatattatgttacttttttcctgtccctggtactcccgtaaccaattttctgacagagaaaggatggttccaaagatgggcttatgttgaggacttcgagcaagattggaagaatgagttacgtagggatgacctctgcgatgacacagtcagtatctatgatggcaccgaggaaaagatagtttactaa

SEQ ID NO: 36 - DNA, 1920 bp, Saccharomyces cerevisiae
atgccggtatctgattctggattcgataattcttcaaaaacaatgaaggacgacactataccgacggaggattacgaagaaatcacgaaagagtccgagatgggtgatgcgactaaaattacttctaagattgatgctaatgtcattgaaaaaaaagataccgattcagaaaacaatataaccattgctcaggatgacgaaaaggtgtcttggctgcaaagagttgtcgagttttttgaggttaagaatgactctaccgatttggccgatcataagcccgaaaatccaattaggacatttaaagatttacaggagtccctccgttcgacgtacttgtacaacacagatctgcggcccgtggaggcaaaaagaagaacgtggacatggaagcagtacattttcttttggatttctgggtcctttaacgtcaatacatggcaaatctcagccactgggctacagttagggcttaactggtggcagacttggatctgtatttgggttggatacacgtttgtcgcatttttcttgatactgggttccaaagtggggaacaattaccatatctctttccccatttcctcaagagtatcatttggtatctacttctccatctggattgtcatcaaccgtgtcgtcatggcatgtgtctggaattctactttggcttatatcggtagtcaatgtgttcagttgatgctaaaggctatcttcggtactaatttgaatactagaatcaaagacaccataaagaaccccaatttgacgaacttcgagttcatgtgcttcatggtcttctgggtcgcatgtttaccgttcctatggtttccacctgacaaattgcgtcatatatttgcactcaaatccgccatcactccatttgcggccttcggttttttgatttggactctttgtaaggccaaaggtcatttggcattgggttccctaaatgacaatggtggcgcaatcagcaagacggttttagcatggtctgtcattagagctattatgagtgctctggataacttctctactttaatcctaaacgctcctgacttcactagattcggtaagacctacaagtcatctgtttactcgcaattgattgcgctacccgtctgctatgccattatttccttaatcggaatattgtctgtctccgcagcttatacattgtacggagtaaattattggagtcccctagacattctgaacaggtacttggataactatacttcggggaacagagccggtgtattcttaatatctttcatttttgcgtttgaccagctgggtgccaacttgtctggtaactcgatccctgcaggtaccgatctgactgcattattgcctaaattcatcaatatcagacgcggttcttatatttgtgctctaatatcgttggcgatttgcccctgggatttattatcatcatcgtcaaagtttactacggcactagcggcatatgcagttttcttaagtgctattgcgggtgtaatatcagccgattacttcattgtcagaaagggttacgttaatattttccattgctacaccgacaagccaggatcgtactacatgtacaataaatatggtacgaactggagggcggtggtagcttatatatttggtattgctcctaattttgcaggctttttaggttcagtgggagtttctgtgcctattggcgctatgaaagtttactacctaaactatttcgttggttatctccttgcagcattgagttactgcattttagtgtatttttacccaattaagggtattccaggcgatgccaagataactgaccgtaaatggctcgaagagtgggtcgaagtagaagaattcggaactgaaagagaagcttttgaagaatatggcggcgtttccactggctatgaaaagatacgatatatctaa

SEQ ID NO: 37 - DNA, 1797 bp, Saccharomyces cerevisiae
atgagtttcggtagtaaagtctccagggctttgagatttttggaaattcctgtcaaagacagggcatctgtgagtttcttgaagaacccggatttgcaacctattaagtcggctaaccaaacatgggggttctggtctaattttgcatattggggtgttatgtccttttcagtgggtacatggatgagtgcctcttctgcactaggtgttggattaagttacccagaaaccattggtacatttatcgtcggtgatgtgttgaccattattttcacattggcaaactcgtgtcctggttacgactggaaggtcggtttcactttggcccaaagattcgtctttggtatttacggttctgccttcggtatcatcatcagaattttgatgagtattgtcaactacgggtccaacgcttgggtgggaggtctttgtatcaatatgatcttggattcatggtctcaccattatttgcacctgccaaacaccttatcttcgaaagttgccatgaccactaaagaattaattggttttatcatcttccacgtccttactgcattctgttacttaatgaaaccctaccacatgaactacattttaatttggtcgtgtgttgctacatttttctctatgttgggtatggtgatctatttagctaaacaggctcacggtgttggagaattgtttacctccactaaatccactgccactggctccaccaaagcttgggcttgggtttatatgatctcgtactggttcggttccgtttctccaggttccaccaaccaaagtgattactcgagatttggttcctccaattgggctatctgggccggtaccatctgtgcattgttaattccaaccactttaatcccagtttttggtgttattggtgcctccacctgtgacaaactatacggtgaacaatattggatgcctatggatatcttcaaccattggttgacaactaactattctgcaggtgctcgtgccggtgcgttcttctgtggtctttcatttgtcctatctcaaatgtcctacaccatctccaactgtgggtttgccagtggtatggatttggccggtttattacccaagtatgtcgacatcaagaggggtgccctttttgccgcatgtgtctcctgggcttgtttgccatggaacttctacaactcttcttctactttcttgactgtcatgagttctttcggtgttgtcatgactcctatcatttctgtcatgatttgcgataacttcttgatcagaaaaagacaatactccatcactaatgcctttattctcaagggtgaatactatttcactaagggtgttaactggagagctattgttgcctgggtttgtggtatgacccccggtctacctggtattgcttgggaagtcaataatgactatttccacaacactggtattgtcaatttcttttacggtgactccttcttctcgtttttgatctcctttttcgtctattggggactatgcctcctcttcccattcaaaattactgtcaaacatgatgacaaagattattatggtgcctttactgacgaagaagcaagaaagaagggcatggttccatacagtgaaatttctgaagaagaaatccgcgcttacacattaggcgaaggttacactaccggccacgagtacagacctgaaggctccgacgatgaaatacctgagttggtcaaaactagctctgaaaacaccaatgagtttgaaatagttcatcataagaataatgaaaagcaatcctccaccgccagtgaaaaagctgcttag

SEQ ID NO: 38 - DNA, 1800 bp, Saccharomyces cerevisiae
atgagtttcggtacgagaatctccagggctttgagatttttggaaattcctgttaaaaatagggcctccgtgaattttttaaggaaccctgatttgcaacctatcaagtctgttaatcaaacgtgggggttttggtctaattttgcgtattggggtgttctgtccttcaacgttggtatgtggataggcggttcgtctgcattaactgttgggttaagttactcagagaccatcggtgcgtttattattgctgatttgttgaccatcctgtttgctttagccaactcttgtcctggctatgactggaaggtcggcttcactctagctcaaagattcgtctttgggatttacggttcagctcttggtatcattatcagaatattgatgagtattgtctattatggttccaacgcttggttaggtgggctttgtgtaaacatgatattagattcttggtctcaccactatttgcatctgcccaatactttgtcctcgaaagttgccatgaccaccaaggaattgatcggcttcattatcttccatatccttaccgcgttctgttactttatgaagccataccatatgaactatattttaatttggtcgtgtgttggtactttcttcgccatgttgggtatggtaatttacttaactaagagcgcacatggtgttggtgacttgttcacttctactcattccacagttactggctctaaaaaggcttgggcttgggtttatacgatctcgtactggtacggttctgtttctccaggctgtaccaatcaaagtgacttctccagatttggttcctctaattgcgctatctggactggtactatagttgctttactaataccagcaaccttgatcccagtattcggtatcattggtgcttctgcttgtgaaaaattatacggtcaaacattttggatgcctatggacatctttgacaactggttgacaactaactattctgcaggcgcgcgtgcagctacattcttctgtggtttttgttttgtaatgtctcaaatttcatataccatctccaactgtgggtttgccagtggtatggatttggctggtttattaccgaaatatgttgatattaagagaggtgctatttttgccgcatgcgtctcctgggcctgtttgccatggaacttttacaactcttcttctactttcttgactgttatgagctctttcggtgtcgtaatgacacctattatcactgtcatgatctgtgataatttcctcatcaggaagagacaatactccgttaccaatgcctttgttctaaagggtgaatactattttaccaagggtgtcaactggagagctatcgttgcctgggtgtgtggtatggctcccggtctacctggtatcgcttgggaagtcaataatgactatttccacaacactggtattataaattttttctatggtgattctttcttctcctttttgatttcctttttcgtctattggggactatgcctcctcttcccattcaaaattactgtcaaacatgatgacaaagattactacggtgcgtttaccgacgaagaagcaaggaagaagggcatggttccatacagtgaaatttctgaagaagaaatccgtgcttacacattaggcgaatgcttcacaagtggacacgaatacaaacctgagagctccgatgatgaactacctgagttgacaaaaactagttcagaaaacacaaaagtgtttgaaattgttcatcagaaagataatgaaaaggaatcctctacttccagtgaaaaacaaattgcctaa

SEQ ID NO: 39 - DNA, 1797 bp, Saccharomyces cerevisiae
atgagcttcagtagtatagtctctaagtttttgagatatttagaaattcctgccaaaaataggactgccgtgaattttctgaggaaccctgatttgcaacctatcaagtctgcaaatcaaacatgggggttctggtctaatttggcgtactggggcgctgtgtcctttacagcaggtacatggatgagtggttctgctgcactaagtgtcggcctaagttacccagagaccattgtttcgtttcttctcggtaatgtcttgaccattattttcactatggccaactcttaccccggttatgattggaaaatcggtttcaccttggcccaaagattcgtttttggcatttacggttcagccttcggtatcatcattagaattttgatgagtattgtcaattatggttccaacgcttggttgggtggtctatctatcaacatgatattagattcctggtcccaccactatctgcacctgcccaatactttgtccccaagtgttgccatgaccaccaagcagttggtcggcttcattattttccacgtcctcaccgcgctctgctatttcatgaaaccctaccatatgaactaccttttaatttggtcatgtgtagctacttgctttgccatgctgggtatagtgatttacttgactaagaatgcccatggtgtcggtgaattgtttacctccacaaaatctaccgttactggttctaaaagagcatgggcttgggtttacatgatttcatactggttcggttccatttctccaggttccaccaaccaaagtgactattcaagattcggttcctccaatttggctatctggaccggtagcgtctgtgcattactaatcccagcaaccttggtcccaatcttcggtgtcattagtgcctccacctgcgacaaattatacggtaaacaattttggatgcccatggatatattcgattattggttgacaaacaactattctgcaggcgctcgcgcaggtgccttcttctgtggtctttgctttaccatgtctcaaatgtcctccaccatctccaactgtgggtttgccactggtatggatatggccggtttgttgcccaaatacgtcgatatcaagagaggtgctcttttttgcgcatgtatctcctgggcttgtttgccatggaacttctacaactcttcttctactttcttaactgtcatgagttctttcggtgttgtcatgactcctattattgctgtcatgatctgtgataactttctgatcaggaagaggcaatattccattactaatgcctttattctaaagggtgaatactattttaccaagggtgtcaactggagagctatcgttgcctgggtgtgtggtatggctcccggtctacctggtatcgcttgggaagtcaacaataactatttccacgactcaggtattgttaaattcttttatggtgattctttcttctcctttttgatttcttttttcgtttactgggggctatgtgtcttcttcccattcaaaattactgttagacatgatgacaaagattactatggtgcatttaccgacgaagaagcgagaaagaagggcatgattccatacagtgaaatttctgaggaagaaatccgtgcttacacgttaggcgaatgctacacaactggacacgaatacaaacctgagagttctgataacgaatcacctgaattgatcaaaactagctcagaaaacactaacgtatttgaaatcgttcaccaaaaggatgatgaaaagcactcctttagtaccactcaacaagttgtctga

SEQ ID NO: 40 - DNA, 1602 bp, Saccharomyces cerevisiae
atgttggaagagggaaataatgtttacgaaatccaagacttggagaagagatctcctgtaataggctcaagcttggaaaacgaaaagaaggtagccgcttctgaaactttcacagcaacttccgaagatgaccaacagtatatcgttgaatcatcagaggccacaaaattatcgtggttccataagttctttgccagtttgaatgcagaaacaaagggtgttgaaccagttacagaggatgaaaaaacggacgattccatactgaatgctgcgtccatgtggttttcagctaatatggtcattgcatcatatgctttgggtgccttaggacccatggtgttcggtctaaattttggtcaaagtgttttagttatcatatttttcaatataatggggttgatatttgttgcgttcttttctgtctttggtgcagaactgggcttaagacagatgattttatcaagatatctggttggtaatgtaacggcaagaattttctctcttattaacgttattgcttgtgtcggttggggtattgtgaatacctcagtatccgcacaactgctgaatatgatgaatgaaggctccggccacgtctgtcctatttgggccggttgtctgatcattattggtggtaccgtgcttgtgactttttttggttacagtgtcattcatgcatacgagaaatggtcatgggtacccaattttgccgtctttttggttattattgcccaactatcgagatcaggaaagtttaaaggtggtgaatgggtaggaggtggaactactgcaggtagtgttctttcttttggttcatctattttcggttttgccgcaggatggacgacctatgcagctgactacactgtttatatgccaaagagtacaaacaagtacaagatttttttctccctagttgctggtctagcgttccctctatttttcaccatgattcttggtgctgcttctgctatggctgctcttaatgacccaacctggaaggcatattatgacaaaaatgctatgggtggtgtcatatatgctatcctggttcctaactctctgaacggatttggtcaattctgctgcgttttgttagctctgtccactattgcaaataatattccaaatatgtatactgttgctttatccgctcaagctttgtgggcacctttggctaaaataccaagagtagtctggacaatggcaggtaatgctgccactttaggtatttccatccctgctacctattactttgatggctttatggagaatttcatggattctatcggttactacttagctatttacattgccatctcatgttcagaacatttcttctacagacgttccttcagtgcttacaatattgatgattgggataattgggagcatctacctatcggtatcgcaggtactgctgccttaattgttggtgccttcggtgttgcattgggtatgtgtcaaacctattgggttggtgaaattggccgcttaattggtaaatatggtggtgacattgggttcgagttgggtgcaagttgggccttcatcatctacaacatcttaagacctttagaattaaaatacttcggtcgttag

SEQ ID NO: 41 - DNA, 1740 bp, Saccharomyces cerevisiae
atgaatagggacaacatggacacaacaaagcgcaaagaagatcatacaaagcatactactgatgtaatagaattttacgaagaaggaaccgcagcttcttctttaaacatagccacagaaaaggccaactcaagtccgtccattttgagaagaattatcaacagggcggcatggctttctaagaaagtggacgcaatgggagtagagtctaccggtattcagaggatatctccctatgaacgaggaacatcaaagaaacaatttttgcatgtcgcggggctatggttgagtgccacaggtggtttgtcttccatgtcgtcgtttttattaggccctctgcttttcggtttaagctttagagaatccgtagcctccagtttaatatcggtaacaattggttgcttaattgctgcctattgctcgatcatgggaccgcagtccggttgcagacagatggtaacagctagatacctgttcggatggtggtttgttaaattagttgcattagcttccattatcggtgtcatgggttggtctgtggttaattccgtggttgggggtgaaatgttagctgctatttctaatgataaagtacccctatgggtagggattgtcatagtgaccgtatgctcctttttagttgccattttcggtatcaaacaagtcattaaagtggaaacttacttatccgtacccgtcctgacagcatttttactactgtacatttcatcaagtgataaatacagcttcgtcaatgcatacgtttcaaagggaaatttggactcttccacccgaaagggcaactggatgagttttttttcattatgctatagtattacggctacttgggggtctattacagcagactattatatattgttcccagaagatacaccatatattcaaattttttgcctaacgttttttggaacatttttgcctacctgtttcgtcggaatcttaggtctcttactagcttctgttgccatgtcgtataagccttggtcagtcgagtacgattcccatggaatgggtggtctactttgggcaggttttcagcgttggaacggcttcggaaagttctgcgtggtagtactggtattcagtttggtatccaacaacatcatcaatacgtattcggcagcattctccatccaactttctagtgtgttttgtgcaaaaatccctcgctggttctggtctattgtttgtactataatttgtttggtatgcgcattaataggtcgtaatcattttagtactattttgggaaatttcctaccaatgataggctactggattagcatgtactttatcttattattcgaagagaatttagtattcagaaggtttttcttacatttgtacaccaaagagtttcctacagttacaggagaaataaatggaccggaacttgttggatcttcaaaagaagtggagaaagatgcagttactaatatccatttgttaaaaagaaaacataaggtgactaaacatcgttacaattgggacaaatgggaagattatgaggttttaacgcacggttatgcagcaacatttgcgtttattgtaggagttgctggtgtggtagttggtatggcgcaagcctattggattggcccaattgctgccaaatttggtgaatatggtggtgatgtcgcaatgtggttaagtatggcgttctcaggtgttgtataccctccttgtagatacttagagctacgtaaatttggtcgttaa

SEQ ID NO: 42 - DNA, 2208 bp, Saccharomyces cerevisiae
atgggagaatttaaacctccgctacctcaaggcgctgggtacgctattgtattgggcctaggggccgtatttgcaggaatgatggttttgaccacttatttactgaaacgttatcaaaaggaaatcatcacagcagaagaattcaccaccgccggtagatctgtaaaaacccggcttagtggctgcagcgtggtttctagttggatctggtgttctacattgttaacgtcgtcaacaaaggaatatgcagacggtatatttggcggttatgcgtacgctgctggcgcatgcttccaaattattgcattcgcaattttggcaattaaaaccaagcaaatggctcccaatgcgcacacatatttagaattagtgagaacaagatatggtaagatcggccatggttgctacttgttttatgccatcgcgacgaatattttagtcacttcaatgcttttaacttcaggttctgctgtctttagtgatttaaccgggatgaacactatcgcatcatgttttttactgcctgtgggtgttgttgtttatactctatttggtgggattaaagcaactttcttaacggactatatgcacacatgtgtcattatcatcattgtcctcgtatttgcctttaaagtttatgcgactagtgatgttttaggctcaccgggaaaagtttatgacttagttcgtgaagccgccaagaggcatccagtagacggtaactatcagggtgaatatatgaccatgacatccaaatccgctggtattttattaattattaacctgattggaaatttcggcaccgttttccttgataatggttattggaataaagcgatttctgctagtcccgcagcgagtttgaaagcatatgccatcggtgggttagcatggtttgcagtaccttctttgatttcattgaccatgggattagcatgtcttgcggtggaaacgtctccgaacttccccacctatcctgatccacttacttcgttccaggcaaattctgggttagtcttgccggcagctgcaattgctatcatgggtaaggggggtgctgtggcatcgctgctaatgattttcatggccgtcacatctgctatgtctgctgaactaattgccgtttcatctgttttcacttacgatatctatagagaatatattgatcctcgtgcaagcggtaagaaattgatttacacatcacacgttgcttgtatcttttttggtcttgccatgagtggattttcggttggtttatactatggtggtatttctatgggttatatctatgaaatgatgggtataattattagtagtgcagtattacctgtcgttttgaccttatgttccaaagacatgaatttggtggccgctgtagtgtcgcctattttgggcacaggactggctataatgtcatggcttgtctgtaccaaatccctttataaagaattgaccgtggatactacgttcatggattatccaatgttaacaggtaacttggtggctttgctatcaccagccatttttattcctattttaacgtatgtgtttaagccacaaaattttgactgggagaaaatgaaagatattactagagttgacgaaactgcagagttagttcaggctgaccctgatatccagctttacgatgctgaagctaacgataaggaacaagaagaagaaacaaattctctggtctcagatagtgaaaaaaacgatgttagagtaaataatgaaaaattgattgagcctaaccttggtgttgtaataagtaatgccatttttcaagaagatgacacacagttacaaaatgaattagacgaagaacaaagagaactagcacgtggtttaaaaattgcatacttcctatgtgtttttttcgctttggcatttttggtagtttggcccatgcccatgtatggttccaaatatatcttcagtaaaaaattctttaccggttgggttgttgtgatgatcatctggctttttttcagtgcgtttgccgtttgtatttatccactctgggaaggtaggcatggtatatataccactttgcgaggcctttactgggatctatctggtcaaacttataaattaagggaatggcaaaattcgaacccacaagatctgcatgtagtaacaagccaaattagtgcgagagcacatagacaatcatcacatttcggacaagttgatgaaataatttag

SEQ ID NO: 43 - DNA, 1806 bp, Saccharomyces cerevisiae
atgctcaaccatcccagccaaggctcagatgatgctcaggacgaaaagcaaggcgacttcccggtcatcgaagaggagaagacccaggctgtaacgctgaaggattcgtatgttacggacgacgtcgccaactccacggaacgctacaacttgtccccttctccggaggacgaagacttcgaaggccccactgaagaagaaatgcagactttaaggcacgttggtggtaaaattcctatgaggtgttggttaattgctattgtagagctttccgagagattctcctactacgggctttccgcaccattccaaaactacatggaatatggacctaatgactccccaaagggtgttctgagcttgaacagtcagggtgccactgggttgtcgtattttttccagttttggtgttacgttacaccagttttcggtggttacgttgcggacaccttctggggtaaatataatacaatttgttgcggtaccgctatttacattgccggtattttcattctatttatcacttcgattccctccgttggtaacagagacagtgctattggtgggttcattgctgccattattctgatcggtattgccactggtatgattaaagctaacctttccgtgttgattgccgaccagcttcctaagcggaaaccctccatcaaagttttaaaatcgggcgaaagagtcattgtcgattcaaatattactttacaaaacgtttttatgttcttctatttcatgatcaatgtcggttctctatcattaatggccactactgaattggaatatcataaggggttctgggcggcctatctattgcccttctgcttcttttggatcgctgttgtcactttgatttttggtaaaaagcaatacattcaaagaccaatcggagataaagtcatcgctaaaagttttaaagtttgttggattttaactaagaataagttcgacttcaacgctgctaaaccttctgttcatccagaaaagaactatccatggaatgacaaatttgttgatgaaattaagagagctttggcggcttgtaaagtctttatattctacccaatttattggacccaatacggtaccatgatttccagtttcatcactcaggccagtatgatggaattacatggaattcccaacgatttcttacaagcattcgattccattgcgttgatcattttcatcccaatttttgaaaaattcgtatatcctttcattagaagatacactccactaaaaccaattacaaaaattttcttcggtttcatgtttggatcttttgccatgacatgggctgctgttctacaaagtttcgtttacaaggctggtccatggtataatgaacctctgggtcacaacaccccaaatcatgtccacgtttgctggcaaatacccgcatatgtcttgatttctttttcagagatctttgcctctatcactgggttggaatacgcttattccaaagccccagcttccatgaaatcgtttattatgtccattttcttattgactaacgcctttggttctgcaatcggttgtgcattgtccccagtgaccgttgatcctaaatttacatggttattcactggtttggctgttgcctgctttatttctggttgtttgttctggttgtgcttcaggaagtataatgatacagaggaagaaatgaacgctatggactacgaagaagaagacgaatttgatctcaatccaatttccgcacctaaagctaacgatattgaaatattagaaccaatggaaagtctaagatccaccaccaaatattag

SEQ ID NO: 44 - DNA, 2400 bp, Saccharomyces cerevisiae
atgagtaccatttatagggagagcgactcgttggagtcggagccctcgccaacgccaacaaccattcctatccagatcaatatggaagaggaaaagaaagatgctttcgttaagaatattgacgaggacgtcaataatctcactgcgactactgatgaggaggaccgcgatccggaaagccaaaaattcgacaggcattccatacaggaggaaggtctcgtttggaagggcgaccctacatacttgcccaattctccatatcctgaagtgagatcggcggtgtccatcgaggatgaccccaccatccgcctcaaccactggagaacgtggttcttgaccacggtgtttgtggtagttttcgccggtgttaatcaatttttttccctgagatatccatcgctagagatcaacttccttgttgcacaagttgtttgctacccaattggtaggatactggctctcttgcccgactggaagtgttctaaagtgccatttttcgatttaaacccgggcccatttaccaaaaaggaacacgccgtggtcacaattgccgtggcgcttacttcctctactgcatacgctatgtacattttgaacgcccagggaagcttttacaacatgaaacttaatgtcggatatcagttcttgttggtttggacatctcaaatgattggttatggtgctgcaggtcttaccagaagatgggtcgtcaaccctgcaagctctatctggcctcagactttaatttcagtgtccttgtttgattcgttgcactcgagaaaagttgaaaagacagtcgcaaatggttggacgatgccccgttacaggttcttcttaatcgtccttatcggatcgttcatctggtattgggtacctggattcctctttaccggtctgtcctatttcaacgttatcctatgggggtcgaagacaagacacaatttcatcgctaacacaatctttggtactcaaagtggtctcggtgcgttgccaattacatttgactacacccaggtttcccaagccatgtccggctctgttttcgccacaccattctacgtctccgccaacacctatgcatcagtgttgatattcttcgtcatagtgctgccatgtctttattttacgaatacctggtatgccaaatacatgcccgtcatttcaggttctacttatgacaacactcaaaacaaatacaacgtaacaaagattcttaacgaggattattccattaatcttgagaaatataaggaatactcaccggtattcgttccattttcctatcttttgtcgtatgctttaaattttgccgctgttatcgccgtttttgtccactgcatcttataccacggtaaagatattgtcgccaagtttaaagaccgtaaaaatggtggcactgacattcacatgagaatctactccaagaactataaggattgtcccgattggtggtatttacttttgcagattgtcatgatcggtttaggatttgtagcagtgtgctgtttcgatactaagttcccagcttgggcatttgttattgcaatattaatttcccttgtaaatttcatcccgcaaggtatcttggaagcaatgactaaccaacacgtaggtttgaatattatcacagaattgatctgcggttatatgctgcctttaagaccaatggcaaacttattattcaagctatacggatttattgtcatgagacaaggcttgaatttgagtagagatttgaaattagccatgtacatgaaggtttcccctcgtttgatctttgccgttcaaatctatgccactatcatatcaggcatggttaacgttggtgtccaggaatggatgatgcataatatcgatggcttatgtaccaccgatcaaccaaatggcttcacttgtgctaatggtcgcacggttttcaatgcttccattatctggtctttgccaaagtatcttttctcatcagggcgcatttataatccgctgatgtggttcttcttgattggtttgctattcccactagccgtttatgctgttcaatggaaattccctaaatttaaatttgctaagcacattcatactcctgtatttttcacaggcccaggtaatattccaccaagcacaccttataactactcattattttttgcaatgtcattctgcctaaacttgataagaaaaagatggagagcttggttcaataagtacaatttcgtcatgggggccggtgttgaagcaggtgtggcaatctccgtcgtcatcatcttcttgtgtgtacagtacccaggtggtaagctcagctggtggggaaacaacgtttggaaaagaacgtatgataatgattataaaaaattttataccttaaagaaaggtgagacatttggttatgataaatggtggtaa

SEQ ID NO: 45 - DNA, 2634 bp, Saccharomyces cerevisiae
atgagtgaaacagtcaaagataaagttataattgatgagaaggtatccacaaaaggtactgttgattacgccgagggtgctgagtattctgagaggctttcaaatcattcatcagacttttctcagtggtatacggatgaacagatactgcactttatgaagaagctgggttatgaaaatcgcactctttatgatattccggaagacgttgcgtatatcctcaaaaaaatgcctgaattgacacttgaggattccttcaaaatactaaaagactctatcatctatttcaaggatgatgagaacattccacacgatcaatatgaggagtggaagagattggttgacttggaggacttggattcaaaagaggggatagatgaatatgatagctttgacattagagcatttgcttctgctattaaatttcattcgccttaccaagaggttagagctgttgttgatccagaagatgatcccaccattccagtggagacattccgagcatattttctggcaataatttggtctgtcatcggttcaggatttaatgagtttttttcacacagggtggtttcaatttcactgaatactccaattatccaaatgtttttatatatctgtggtaaggcttgggctaaaactatcccctgttggactataaccatcaggggcagaaagtatggtatcaatatcgataaaccatggacccaaaaagagcaaatgttttcaaccttgttatatgcaatttgtcaaggcgcgttctatactcattacaatattctaacgcaaaaactcttttaccattctgctttctcgtttggctaccaatttttactttcgttatccgtacaatttattggatttggatttgctggcatccttagaaaattcgttgtttatccagcccgtgcactatggccaacagtcatgccaactattgctatcaacaaggcactattgggtaaagaaaagcatgaatctggaatgagcaggtataaattctttttcttgactttttttatcatgttcatctataactggtttcccacttacattattaatattctaaacactttcaattggatgacctggatcaagccaagtaacattaatctcgcaaacatcacgggaggagtcactggtcttgggattaatcctatctcatcttttgactggaatgttatttcgtttaattctcctttagtttacccattttggtcatacttaacacaatatcttggttgcatattagcagctttaattgttattgcagtatactatagtaattatatgagttgccaatacctgccaatattcacaaattctttgtatactaatactggccattcctttaaagttactgaggtattagacagtgacaataagctagatgtgaaaaaatatcaaagctactcgccaccatactatagtgctggaaatttggtatcatatggtgctttcatttgcgcatatcctctgatgattacatggtcgtttattgtacactcaaagttattgttcaatgctttcaaagattgggctttgaatttgtgggccatgagaaaacttaaatcttgggtcacaatgttcaaaagcgattacagggcgctcgacgattatgatgacccacattctaatgccatgaaaaactataaagaagttccagattggtggtattttgccatattgataggttcacttgttgttggaatagctgttgtagagcactacccaacaaatacaccagtttggggtctttttgtttgtttaggatttaattttgttttcttgattccaactactatccttcaagcaaccactggttattcgtttggtttgaatctactaattgaaatggtgatggggtacgctttaccaggtaatccaatcgccataatgattttgaaggcttttggttataacatcgacggccaagcagataattacgtttctaacttaaaaatagcgcattattgtaagattccgccaatggcgctattcaggggacaatgtgttatagttttcattcagatatttgtcaatctaggtgttctgaattggcaaatctccaatatcaaagacttttgcacacctcatcaaaacgcaaaattcacctgtcctgatgctgtgacctactataatgcttccgttgtctggggtgcaattgggccaaaaagaattttcaattacatttatccaatatttaaatggtgttggttgataggcgcatgcattggcatattttttggtgtttggaagcgctggggtaagttttatcccagatattttgacccaatgttatttgtaggtggaatgcttaatatgagccctccatataacctgatgtattacacttctggtatgattgttagttacatttcccagtactacatgaaaagacaccatttaaatctgtgggagaaatataattatgttttatcggcaggcttttcaacgggcttggttttatcagctattatcattttctttgctgtccaatataaagacacagcttttaattggtggggcaatacagttccgtatgctggtgccgatggcgttggctatcctctaaagaacataactgatacagcaaatggctatttcggctatgctccaggacactatccatga

SEQ ID NO: 46 - DNA, 828 bp, Saccharomyces cerevisiae
atgacatcgtctgcttcttctccacaggatttggaaaagggtgtgaacactctagaaaatattgagacgctcccccagcagggttcgattgcaggcgtttcgcagggcttccctaatattcaagagatatactccgacagagacttcattactctaggatcctccacctacaggcgcagagatttgctcaatgcactagacagaggggatggggaggaaggaaactgtgcaaagtatactccgcaccagttcgctaatccggttcctttgggtctcgcatcgttttctctgtcatgtctagttctgtcgctaattaatgcgaacgttcgcggcgtcactgatggtaaatgggcgctaagtttgtttatgttttttggtggtgccattgaattgtttgccgggttattgtgttttgtcattggggacacatacgccatgactgtgttcagttctttcggcgggttctggatctgctacggttatgggctaacagatactgataatttggtcagcggctataccgatcccacaatgttgaacaatgtcattgggttcttccttgcgggctggaccgttttcaccttcttgatgttgatgtgtacattgaagagcacgtggggtttgttcttactattgacgtttttggatcttaccttcctactactgtgtatcggcaccttcattgacaacaacaatctcaaaatggccggtggctattttggaattttaagtagttgctgcggttggtattcgctatactgttctgtggtgagtccttcaaattcttatttagccttcagggcgcacacaatgccaaatgctccttaa

SEQ ID NO: 47 - DNA, 1761 bp, Saccharomyces cerevisiae
atgtcacgaagtaacagtatatacacagaagatattgagatgtatcctactcacaatgagcagcatctgacgagagaatacacaaaaccagatggtcaaacgaaaagtgaaaaactaaatttcgaaggcgcttatatcaacagtcacgggactctatccaagactaccacaagggaaatagaaggcgatttagactctgagacttcttctcactccagtgatgataaagttgatccaacccaacagataactgcagagacaaaagcgccatatactttactaagttacggtcagaagtggggaatggttgcaattctaacaatgtgtggcttttggtcttcattgggatcaccgatctattatcccgctttgaggcagttggaaaagcaatttaatgtggatgaaaatatggttaacgttactgtggttgtgtatctgttgtttcaaggtatatctcccacagttagcggtggtctggcggattgctttggacggagacctataattttagcaggtatgctgatatacgttattgcatccatcgggctagcatgtgctccatcatacggtgttattatcttcttgaggtgtattcagagtattggtatttcccccacaattgcaatcagttctggtgttgtcggggacttcactttgaagcatgaaagaggtacatttgttggcgccacctcagggtttgttttactgggtcaatgttttggtagtcttattggtgccgtcctgactgcaaggtgggattggagagctatcttttggtttttgaccattggttgtggaagttgttttctaattgcctttcttattttgccagaaacaaagcgaaccattgcaggtaacctttccattaagcctaaaagattcatcaacagagcgccgattttcctactgggcccagttagaaggagattcaagtacgataatcctgattatgagacattagatcccaccattccgaaactagatttgtcatccgccgggaagatccttgtattgccagaaattattctgtctttatttccatcagggctcttatttgctatgtggacgttaatgctttcctctatttcatccggtttatcagtggcgccatacaactatcatttggtcattattggtgtgtgttatctacccggtggtattggcggtttaatgggttccttcttcacaggtagaattattgacatgtatttcaagagaaagatcaagaaattcgagcaagacaaagctaacgggttgattccacaagacgcagagattaatatgttcaaagtccgtttagtttgtcttctgccccaaaatttcttggccgtcgtagcctatcttttatttggttggagtatagataagggctggaggatcgaatctattttaattacttcatttgtctgttcatactgtgctatgagtacattatcaacatcaactacgttattggtcgatttgtacccaacgaaatcatctacagcaagtagttgtttcaactttgttaggtgcagtttgagtaccatcttcatgggttgctttgccaaaatgaaagctgcgatgactgtaggtggtacttttacatttttatgtgcgctggtatttttcttcaacttcttaatgtttattccgatgaaatatggtatgaagtggagggaggatagattattgaaacaacaaagacagtcttggttaaacaccttggcagtcaaagccaaaaagggaacaaaaagagaccagaacgataatcataattaa

SEQ ID NO: 48 - DNA, 1761 bp, Saccharomyces cerevisiae
atgtcggatcattctcccatttctaataaggaaaatcatctgctgccatcagactcgtcaagaagctcatccagcgatatgcattcgacgggcaccacgggaaccacaggcgtcgaacctgtagatttcaccggtgaaggtgccaaatacacaactgctacggagggcaatggtggtgcagatttagcgattcaaagaacgacgactatgaattctgctgcagaatcagaggttaatatcacgagaagattaactaaaatccttactgggtctgttaacgagcctgaccgtgtagaggttgattataccaattgtgcgcccatgggtggtgacagaccttaccctccatcgttgccgagcagagacctgtacgaggttacttttgatggtcctaacgacccactacatccatttaactggcccatgaagaagaaagtgctgctatgtctggtcttatgtctggattctattgccattgctatgtgttcttccatttttgcctctgcagtgccgcaaatctgcgagatataccacgtcatcgaagttgtcgccattttgggtatcacgctttttgttcttgggtttgcggcctcaccggttatctatgctcctctttctgaattgtacggtagaaagggtgttctggttttatctgcgtttggatttgcccttttccaatttgctgtcgctactgctgagaacctgcaaactattttcatatgtagattctttggtggttttatcggggcagcacccatggccgtcgtccccgccgcgtttgccgacatgtttgatactaatgttagaggtaaagccattgcgctattttctctaggtgtttttgtaggccccattttatcgcctgtcatgggttcttatatcgcacaaagaactacctggagatggttagaatatgttgtcggttgtttcgcttccgcagttttcgttgccatcgtattgttctttgaagaaacacatcaccctaccattttggttaacaaggccaaacagatgagaaagcaaagtaataactggggtattcatgctgctcatgaagacgtggagctatccatcaaagacattgtccaaaaaactgtgacgaggcctatcattatgcttttcgtggaaccattgctactattcgtgactatttacaactcttttgtctacggtatcttgtatttgttactggaagcctacccacttgtctttgtggagggttatgggtttactgaaaacggtgagttgccatacatcgccttgattatcggtatgatggtgtgtgctgctttcatttggtatatggacaacgattatttgaaaagatgtagagccaaggggaaattagtgcccgaggccagattgtacgcaatggtcattgcaggtaccgttttccctattggtatcttatggttctgttggacgggctactatcctcacaagattcattggatggtccccacagtaggaggggccttcatcgggttcggtttaatgggtattttcttgccatgtttaaactatatcattgaatcgtatctattgttggcagcttctgccgtcgcagcaaacactttcatgaggtctgcatttggtgcatgcttcccattgtttgcaggatatatgttccgtggcatgggtatcggttgggctggtttgttattaggtctatttgccgctgcgatgattcccgtgcctttactattcttaaaatatggtgaatctatcagaaagaaatccaagtatgcttacgccgcttaa

SEQ ID NO: 49 - DNA, 2709 bp, Saccharomyces cerevisiae
atggagcaaatcaattcgaacagtagaaaaaagaagcaacaattggaagtattcaaatattttgcaagtgtccttacaaaagaggacaagcctattagtatcagtaatggtatgttagatatgccgacagtgaactccagtaaactcacagcaggaaatgggaaacctgacacggagaagcttacaggagaactaattttaacatacgacgatttcattgaactgatatctagctcaaagactatttattcgaagtttacggaccattcgttcaatttgaaccagatacccaagaacgttttcgggtgtattttcttcgctattgatgaacaaaacaagggatatctgacgcttaatgattggttttattttaataatttattagaatatgataattatcatctcattattctatatgagttctttaggaaatttgatgtagagaatttgaaggcaaaacaaaaaaaagagcttggtagttcgtcgtttaatttaaaggctgcagatgatcgaattaagtcaattaattatggtaacagatttctaagctttgatgatcttcttttgaatctgaaccaattcaaagatactatccgcctgttgcacgaatctattgatgataattttgttaaagataacaaattactacttgattggaatgactttcgatttctgaaattttacaaatgttatcatgaaaatgaagagtatttgagtttaaactctctggtcacgattttacaaaatgatcttaagaatgaaaaaatatttataggttttgataggttggcacagatggactcacaagggcatcgtttagccctaagcaaaaatcaactcacctatcttctaaggttattttactctcacagggtgtctgcagatatattttcctccttgaatctatcaaacaccgaattactaaaagcggacaataattccattccgtacaatgtattcaaggatatattttatttatttcaaaattttgacctactgaaccaaatatttcacaagtatgttactgaaaataatttgaatgagcaggatattagggaacaaatagttactaaaaatgactttatgacagttttaaacgcccagtataacaaagtaaacaatatcattgagttctctccttcccaaatcaacctactattttctatcgtcgcaaattcaaaggaaaacagaagattaagaaagagaaatcaagatcgagatgacgagctattaaatgatcaccattatgattcagatattgatttttttatccataatgagtatttgcatggagtaagcagatccagaaaaaatttagaaagttttaatgactattatcatgatctctcggatggatttgaccaagactctggtgttaaaaaagcttcaaaagcgagtactggcttgtttgaatctgtatttggaggtaaaaaagataaagcaacgatgcgttctgacttaacaattgaagatttcatgaaaattttgaacccaaattacctgaacgacttagttcaccaaatggaattgcaaaaaaatcaaaatgagtcattgtatattaattactacttttatccaattttcgattcgttgtacaatttctccttgggttctattgcgggttgtattggtgcaactgtagtatacccaatagactttataaaaacaaggatgcaagcccaaagatctttagcccaatacaaaaactcaattgattgtttgttgaagattatatcccgcgaaggaataaaaggtctctactctggcttagggccacaattaataggagttgctcctgaaaaggcgataaaattgactgtcaatgattttatgagaaacaggttgactgataaaaacggcaagctaagcctttttcctgaaattatttctggcgcttcagctggtgcatgtcaagttatatttactaatccgttagagattgtaaaaattaggctacaggtccaatccgactatgttggtgaaaacatacaacaagccaatgaaactgccactcaaatagtcaaaaaattaggactgaggggcttgtacaatggtgtagccgcatgtttaatgagagatgttccattctctgctatttattttcccacttatgcacatttaaaaaaagatctctttgattttgatccaaatgataaaacaaagaggaatcgattaaaaacatgggagcttttaactgccggtgccattgctggtatgccagctgccttcttgactactccttttgatgttataaaaacaaggctccagatagatcctcgaaaaggtgagacaaagtataacggtatatttcatgctatccgaactatcttaaaggaagagagctttagaagctttttcaaaggtggtggagcccgtgtcctaagaagttctccccaatttgggttcactctggccgcctatgaattattcaagggctttattccctcccccgataacaaattaaaaagcagagagggtaggaagagattttgtatcgatgacgacgcaggcaatgaagagacagtagttcatagtaacggtgaactcccacagcaaaagttttactctgatgatagaaaacatgccaattattactataaaagctgtcaaattgcgaaaacattcattgatttggacaataacttttctaggtttgactcttcagtttataaaaactttcaagagcacctaagaagcattaacgggtga

SEQ ID NO: 50 - DNA, 933 bp, Saccharomyces cerevisiae
atgacatctatagataatagacctttgccgttcatataccagttcacagccggtgccattgccggcgtctcggagctattggtgatgtatccattggacgtggtgaagacaagaatgcaattacaagtgacaaccaaaggtcatcccgctgttgttgcagcgaaagcagcagtagatcactacacgggcgtgatggattgtcttacaaaaattgtgaagaaggaaggattttcgcatctttacaagggtatcacatcgcctatattaatggaggctccgaaaagagcaattaagttctccggaaacgatacattccaaacgttttataaaaagattttccccacgcccaatggggagatgactcaaaaaatcgccatatacagtggtgcgtccgctggcgccgtggaagcctttgtcgtcgcgccttttgaactagtgaagattagattacaggatgtgaattcacagttcaagacacccattgaagttgtaaagaatagtgttgtgaaaggtggtgttttgtcacttttcaatgggttggaagccactatctggagacacgttctttggaatgccggttatttcggtataatattccaaattcggaagcttttgccggcggctaaaacaagcacggaaaagaccagaaatgatttgatcgcaggtgctattggtggcactgtcgggtgcttgttgaatacaccatttgacgtggtaaaatctaggatccaaagaagttccgggccgctgaggaagtacaactggtccctgccttcagtgctgttagtttaccgtgaggaagggtttaaagcattgtataagggatttgcgccaaaggtcatgagacttgcccccggtggtgggttattgttggtagttttcacgaacgtcatggattttttcagagaagtcaagtatggtaaaaaacaatga

SEQ ID NO: 51 - DNA, 924 bp, Saccharomyces cerevisiae
atgtcatcagactcaaacgcaaagccattgccttttatatatcagttcatatcaggtgccgtcgccggtatttctgagttaactgttatgtatccgcttgatgttgttaagacaagatttcaactggaggtgacgacgcctactgccgctgcagtaggaaagcaagtagagagatataatggtgtcatcgattgtttgaaaaaaattgtaaagaaggaagggtttagcagactttacagaggtattagttcaccaatgttgatggaagcaccaaagagagccaccaaatttgcatgtaacgatcaatatcaaaaaatcttcaaaaacctattcaacacgaatgaaactacgcagaagatctccattgcggctggtgcatctgctggtatgacagaagctgcagttattgttccatttgaattgatcaaaatcaggatgcaagacgtcaagtccagctatcttggaccaatggactgtttgaaaaaaacaatcaaaaacgaaggtattatggggctatacaagggtatcgaatctaccatgtggagaaacgctctttggaatggtggctacttcggtgttatctaccaagtgagaaattccatgcccgtagcaaagacaaagggacaaaagaccagaaatgaccttattgcaggtgcgatcggtggtacggtcgggaccatgcttaacactccctttgacgtggtgaaatccagaatccaaagtgtggacgcggtcagcagtgctgttaaaaaatacaactggtgcctaccttcgctattggtcatataccgtgaagaaggcttcagagcattgtacaaaggtttcgtccccaaagtatgtagactagcacccggtggttcattaatgttggtggtttttaccggtatgatgaactttttcagggatctgaagtacggacactga

SEQ ID NO: 52 - DNA, 879 bp, Saccharomyces cerevisiae
atggaggacagtaaaaagaaaggattaatagaaggcgctatactcgatataataaacggttccattgcaggcgcctgtggtaaggtgatcgagtttcctttcgatactgtgaaagtcaggttgcaaacacaagcatccaacgtgttcccaacaacatggtcttgtataaaatttacttaccaaaatgaaggaatagcacgagggttttttcaaggcattgcttcacctttagttggagcatgtctggagaacgcgacattatttgtgtcttataaccaatgttctaaatttttagaaaaacatacaaacgtttccccgttggggcaaatcctgatctctggtggagtagcgggttcatgtgctagtttagttttgacacccgtggagctggtgaagtgtaagttgcaggttgcgaacttacaagttgcatcagctaaaacgaaacatacaaaggtgttgcctacaataaaagcaattataactgagagaggattggcaggattgtggcaagggcaatcgggcacttttattcgagaaagcttcggtggtgttgcctggtttgcaacctacgaaatagttaagaagtcgttgaaagataggcactcccttgatgacccaaaaagagatgaaagtaagatatgggaactacttattagtggagggagcgctggattggcattcaacgccagtatttttcctgcggatactgtgaaatcagtaatgcaaactgaacatataagcctcaccaatgcggtgaagaagatatttggcaaatttggactaaagggtttttatcgaggactgggtataaccctttttagggcagtaccagcaaacgctgcagttttttacatctttgagactctttctgcactttaa

SEQ ID NO: 53 - DNA, 900 bp, Saccharomyces cerevisiae
atgtccagtaaagctaccaaaagtgacgtagatccattgcactcgtttctggcagggtccctagccggtgctgctgaagcatgtataacatatccttttgaatttgccaaaacaaggctgcagctgattgataaggcctccaaggcatcaagaaatcctctggtattgatatataaaactgcaaaaactcagggcattggttccatttatgtcggatgtcccgcatttattattggtaacaccgctaaggcgggtattagatttcttggctttgataccattaaagacttgctaagagatagggaaactggagaactaagtggtacaagaggggtgatagctgggttaggtgcgggactattagaaagtgttgccgcagtgactccttttgaagcaatcaaaactgctttgatcgatgataaacaatctgctacaccaaaataccataataatgggcgcggtgtagtacgaaactattcatcattagtccgtgataaaggattttctggtctttatcgtggtgttttgccagtttccatgagacaggccgcaaaccaagccgttagattgggttgttacaataagattaagaccttgatccaagattatacggattcgccaaaagacaaacctttatcatccgggttaaccttcttagtgggtgcatttagtggtattgtgacggtctattccaccatgccccttgatactgtgaaaacaagaatgcaaagtttggattccaccaaatactcctctacaatgaattgttttgcaaccattttcaaagaagaaggtttaaagacgttttggaaaggtgctacgcctagacttgggagattggtcttgagtggtggtattgttttcactatctatgaaaaggtcttagttatgctagcctga

SEQ ID NO: 54 - DNA, 975 bp, Saccharomyces cerevisiae
atgtcatctgacaactctaaacaagataaacaaattgaaaaaacagccgcccagaagatatcgaagtttggttcgtttgtggctggtgggctagcagcatgtatagctgttacagttactaatccgatcgaattgattaaaatcagaatgcagcttcaaggtgaaatgtcagcatcagctgcaaaagtttataaaaatccaatccaaggtatggcggtaattttcaaaaacgaaggtataaaaggtctgcaaaaagggttaaatgctgcttatatctatcaaattgggctaaatggttccagattagggttttatgagccaatcagatcatcattaaatcagcttttcttcccagatcaagagccacataaggtacagagcgtcggagttaacgtcttttctggtgccgcatctggtataattggtgcagtcattggctctccattattcttggtgaaaacaagacttcaatcatattccgagtttataaaaattggtgaacaaacgcactacaccggtgtttggaacgggttagtaaccatttttaaaaccgaaggtgttaagggtctattcagaggtattgatgcggcaattttaaggacaggtgctggttcctctgttcaactacctatctacaacacagcaaagaacattttggtcaaaaatgatctgatgaaagatggcccagcattacatttaactgctagtactatctctgggttaggtgttgccgtcgttatgaacccatgggatgtcattttgacaagaatctataatcaaaaaggtgacttgtacaagggacctatagattgtttggtcaaaactgttagaatcgaaggtgtaaccgctttgtataagggttttgcagctcaagtgttcagaatcgcacctcatacaatcatgtgtttgaccttcatggaacagacaatgaaactagtttattcgatagagtcgagagttttaggccataattaa

SEQ ID NO: 55 - DNA, 1530 bp, Saccharomyces cerevisiae
atgcgtaactatttagttaaatttttgtatattttttattctatgacttcacttatccattatttccatcgtcaaaaaaaggaaataaatactgttgctcgaacgaacagcaagataaagtggaaacgaaaagtaagcagcttcctcaatatgccgtcaaacgtacgttcgggagtcttaactttgctccatacagcatgtggagcaggcgtacttgcaatgccgtttgcattcaagccatttgggttaatgcctggtctgataacgctaacattttgcggaatatgttccttatgtgggctgctattacagactcgaatagcgaagtacgtacctaaatctgagaacgcctcgtttgctaaactcacccaactaatcaatccgtcaataagtgtagtgttcgattttgccattgctgttaaatgttttggcgttggtgtatcttacttaattattgttggtgacttagtgccacagatagtgcagtcaattttttatcgtaacgatgataacatgagtggttcgcaagagcatcacatgttcttagacaggcgtttgtatataactctgatcatagtgtttgttatctcccctttatgctttaaaagaagtttgaattctctacgatatgcttctatgattgccattgttagtgtcgcatatttatctggtttgattatttaccattttgtaaatcggcatcagctagagagagggcaagtatattttatggtacctcacggagattctcagtctcattctcccctgactacattgccaatttttgtgtttgcttacacttgtcaccacaatatgttcagtgtaattaatgagcaagtggataagagcttcaaggtaatcaggaggattccgatttttgccatcgtgttggcctattttttatacatcataattggtggtacaggttatatgacatttggtgagaatattgtaggaaatatcctcactttatacccgaattccatctccaccaccatcgggaggttagcaatgctgctattagttatgttagcatttccattgcaatgccatccttgcagatcatcggtaaaaaacataattatattcattgaaaatttcagaaaaggtaagttatacgataacagagctagctttattccattagacaactttaatagtgaagatccgcaggaggcgccaacccaacaaaacaacgaagagccaaatctgcgtagtgagtctttacggcatatcaatattatcaccctttgtatcttactgttctcatatctactggctatttcaattacgtctctagcaaaagtcctagcaatagttggtgccacgggatctacgtcgatttctttcattttgccaggcctttttggttataaattaattggctcagaatttacgggcacgaatgaaagagtaccgacaagcataaaaatattcaaatacttaagtttatctctattcatctgggggatagcagtaatggtagcttcactatcagcgattgtatttttgggcacatcatcacattga

SEQ ID NO: 56 - DNA, 1074 bp, Saccharomyces cerevisiae
atgacgcgagatagcccagattctaacgacagctataagcatataaacaagaatactacacaaaaaacctcgtttgatagaaattcattcgattatattgtacgatcgggattagctggaggtatatcaggttcatgtgcgaaaacactaatcgcacccttagatagaataaaaattttatttcaaacatcaaatccgcactacacaaagtacacaggctcactaataggattagtagaggcagccaagcatatatggatcaatgatggggtaagggggttttttcaaggccattcagcaacccttttaaggatttttccatatgctgctgtcaaatttgttgcttatgaacagattaggaataccttgattccctcaaaagaatttgagtcacattggagaaggttggtgagtggttcactggcaggattatgcagtgttttcataacatatccgttagatctcgtgagggttaggttagcatatgaaacagaacataagagagtaaagctaggaagaataatcaagaaaatatataaggaaccagcttcagccacgctaatcaaaaatgattatattcctaactggttttgtcattggtgtaatttttataggggttatgttccaactgtacttggcatgataccatatgcaggtgtttccttttttgctcacgatttacttcatgatgtgctgaagagtcctttctttgccccttattcagtattagaactttcagaagatgatgaattggaaagagtacagaaaaagcagagaaggcctttgcgtacgtgggctgaattgatctctggtggtctagctggtatggcctcccaaacggcagcatatccatttgaaattattaggagaaggctccaagtaagtgcactgtcaccaaaaactatgtatgatcataaatttcaatcgatatctgaaattgctcacataatatttaaagaacgtggagtacgtggattttttgttggtctaagcataggttatattaaagtaacacctatggttgcatgtagttttttcgtctatgaaagaatgaaatggaattttggcatttaa

SEQ ID NO: 57 - DNA, 924 bp, Saccharomyces cerevisiae
atgtctgaagaatttccatctcctcaactaatcgatgatttggaagaacatccacagcatgataatgctcgagtcgtgaaagatttgcttgcaggtacagcgggtggtattgcgcaagtgctagtgggccagccctttgatacgacaaaagttaggttacaaacatcgagcaccccaacaacagccatggaagtcgtcagaaagctgcttgccaatgaagggcctcgcgggttttacaaaggaactctgacgccattaattggtgttggtgcatgtgtttcattacaatttggtgttaatcaagctatgaagagattttttcatcatcgcaatgctgatatgtcatcgactttgtcattgccacagtattacgcatgtggtgtcacaggcggtatagtaaactcattcttggcgtccccaattgagcatgtcaggattcgcttgcaaacacagactggctcaggcaccaacgcagaattcaagggtcctttggaatgcatcaaaaaattaagacataacaaggccttgctacgtggtttaacacctacaatattgagagaaggtcatggatgtggcacatatttcttagtgtatgaagcgttgattgctaaccaaatgaacaaaagacgtggactagagagaaaggacattcctgcatggaaactttgtatttttggagcattgtctggcactgccttatggttgatggtatatccattagatgtcatcaagtctgtcatgcaaacggataatttacaaaagcctaaatttggtaattctatttccagtgtagccaagactttatatgccaatggagggataggcgcttttttcaaagggtttggtcctaccatgctaagagctgctcccgccaatggtgccacttttgctacttttgaattagcgatgaggttattgggttga

SEQ ID NO: 58 - DNA, 990 bp, Saccharomyces cerevisiae
atgagtgaagaatttcctacgccgcagcttttggatgaattggaagatcaacagaaagttaccacgccgaatgagaagagagagttaagttctaatcgtgtgttgaaggatatttttgcgggtaccatcggtggtattgcacaagttcttgtagggcaaccgtttgatacaacaaaagttaggcttcaaacagccaccacaagaacaacaacgttggaggtattgcgtaacttggtaaagaatgagggtgtgtttgcattctacaaaggtgcgttaacaccgttattgggtgttggtatatgtgtctcagtacaatttggtgtgaatgaggcgatgaaaagatttttccaaaattacaacgcttctaagaacccgaatatgagctcacaggacgtagatctttcacgttcaaatactctgccactatcccagtactacgtttgtgggttgacaggtggtgtagtcaattcattcttggcatcgcccattgaacaaataagaattcgtttgcagacgcaaacatctaatggtggagacagagaattcaaaggtccttgggactgtattaaaaaattgaaagctcaaggtggattgatgaggggtttatttcccacaatgataagagccggacatgggcttggtacatattttcttgtctacgaagcattggttgccagagaaattggtacgggactaacaagaaacgaaattcctccttggaaattatgcttatttggtgcattttccgggacaatgttgtggttgacagtatacccattggacgttgtgaaatccattatacaaaacgatgatttacgaaaacctaaatacaagaattccatttcttacgtagcaaagaccatttatgcaaaagaaggtatcagagcctttttcaaagggtttgggccaacaatggttaggtccgcgcccgttaatggtgcgacattcctgacgtttgaattagtcatgagatttctgggggaagagtag

SEQ ID NO: 59 - DNA, 855 bp, Saccharomyces cerevisiae
atgaatactttttttctttccttgctaagtggcgccgctgctggtacctctacggatttggtttttttccctatagacacaattaaaaccaggcttcaagctaagggtggattctttgctaatggaggatacaaaggcatatatcgtggtttgggaagcgctgttgtagcatcggcgccaggtgcttcacttttctttattagttatgattatatgaaagtaaaatcaaggccatatatcagcaaactttactcacagggatctgagcaattgattgatacgacaacgcacatgctttcctcttccattggtgaaatttgtgcttgtcttgttcgagttcccgcagaagtcgttaagcaaaggacgcaagttcactctaccaattcttcctggcagactttacagtcaattctacgaaatgacaataaggaaggtttaaggaaaaatctttatagagggtggtctaccaccattatgagagaaataccgtttacttgtatacagtttcctttatacgagtatctaaaaaagacttgggcaaaagccaatggccaaagtcaagtggagccatggaaaggggctatctgcggttctattgcgggtgggatcgcagcagctacaacgacaccattagatttcttgaaaaccagattaatgctcaacaaaacaaccgcctcacttggaagcgttattattaggatttacagagaggaaggtcctgctgtatttttcagtggagtggggccccggacaatgtggatcagtgcaggtggtgctatcttcctaggcatgtatgaaactgttcattcgttattatcgaaaagtttcccaacggctggagaaatgagagcgtaa

SEQ ID NO: 60 - DNA, 1809 bp, Saccharomyces cerevisiae
atgcctgagcaagaaccattgagtcccaatggccgtaagcgctctgaggttcactatatctcaatcccattgaacagaggttccgcattctcaccagatgattctgtatcacagtttcagtctgacgggttcatgacacgtaggcaatccatattggaccatcctgtgggctcatttaagggagttaattctttaagtcgatttgcgacttcgttgaggagagccaattcgtttcgtaatatcgagctaaatgcggataatgaaagatcctttttcaaagagagtaacgatgaaacctacgatccggatactttagcaccagctttggacggtagaagattatcagtaactttaaataatgctggtcgcccgcgcattactaatttggctaacaacgatagagttagtacagccagcatggctattcacgatgatgattatgggtccatccaaaattcaacaattggggattctgggtcaatattacgccctactgcctccttaacagaaatgatgagtggtggagcggggagaaggtttacaaataatgacatggattcaattgtagtgaagagagtggagggtgtagatggtaaggtagtaactcttcttgctggtcagtcgaccgctccacagaccatattcaactcaatcaatgtactgattggtattgggctcctggcgttacctcttggtttgaaatacgccggctgggttataggacttactatgcttgcaatcttcgccttagcgacattttgtactgctgaacttttgtctaggtgcctagatacagatccaactttgatatcttacgcggacttgggatatgcagcatttggtacaaaagggcgcgcactaatttctgctcttttcacacttgacctactgggtagtggggtgtccttggtgattctcttcggagattctttaaatgctctatttcctcaatactccaccacttttttcaaaatagtttcattttttatcgttacacccccggtttttataccattgagtgttctatctaatatctcgcttctgggaatcctttcaacaaccggaactgtgctagtcatttgctgctgcggactatacaagtcgtcttctccaggttcattagttaatccgatggaaacgagcatgtggccgatagatctaaagcatctctgtttatctataggtttattgagtgcctgctggggaggacatgcggtttttcccaacttaaagacagatatgaggcatccagataaatttaaagactgtttgaaaactacctataagataacatcggttacggacataggtactgcagttattggctttttgatgtttggaaatcttgttaaagatgaaattactaagaacgttttgctgacggagggatatccaaaattcgtttatggtctgatttcagcgcttatgactatcattcctatcgcaaagaccccattgaacgcaagacctatcgtttctgtattggacgttctgatgaatgtgcaacacatagatgaagcggccagcgccataaaaagaagagctgcgaaaggccttcaagtattcaataggatctttattaatgttgtcttcgttttgatagctattaatttccctgaatttgataagattatcgcatttctgggggccggtttgtgttttacaatttgcctaattttgccgtgttggttctatttaagattgtgcaagacaacaatcaaaccatgggagagagtggcttgtcacgtaaccatatgtattagtgtcgtgttgtccacattaggtgttggtgctgcaattatttcataa

SEQ ID NO: 61 - DNA, 1443 bp, Saccharomyces cerevisiae
atgtctgagttaggtgagtattctaaattagaaaacaaagagcttagaacggagtttgaattgacaaattttccttttccaggcacaactgataacgactccgatgacggaagccaagggcagaactctttgaatatcattactcctgacatggatgatactctggttaatgatgtacttcgagaaaacgataaaaagtctagtatgagaatggcttttatgaatctagcaaactctattcttggtgccggaataattactcagccgttcgcgatcaaaaatgctggtatattaggcgggctattatcatacgtagccctcggatttatagttgattggacgttaagacttattgtcattaacttgactcttgctggcaagagaacataccagggtacggtcgaacatgtaatgggtaaaaaagggaaattgctgattctatttacaaacgggttatttgcatttggtggatgtattggttattgcataattattggggatacgataccccacgtactcagagctatattcagccagaacgatggtaatgtacatttttggctcaggcgaaatgtcataattgtaatggtcactactttcatttcctttccgttatcaatgaagagaaacatagaggcactatcaaaggcatctttcttggccgttataagtatgattataattgtactgacagtggtaattagaggacctatgctgccctatgattggaaaggtcattctctgaagttatctgattttttcatgaaagctactatattcagaagtctctctgtcatttcctttgcgttggtttgtcatcataatactagttttattttcttttccatgaggaatagaagtgtggcaaaatttaccaggttaacgcatatcagtatcattatctcagtaatatgctgtgcactaatgggatattcgggatttgcagttttcaaagaaaaaacaaaaggcaatgttttaaacagtttcccaggaacagacactgctatcaacatagccagactctgtttcggatttaacatgctaaccacattccccatggaaatttttgttttgagagatgttgtcggtaacttgttacatgaatgcaaccttattaaaaattatgacgaacacactcaattatcaggtaaacagcacgtcgttataacttcttcactagtcttcatcaccatgggtatatcattaactacatgtaatttaggagcattatttgaactgattggggccactacggcatcgactatggcttacattttgccgccatacacaaatttgttgttaactagtaagaagaagagttggaaggaaaggcttcctttctatctttgtatatgctttggtttcatgattatgataatcagcagcacccaaactattattgatgcagttaatggttctgatggacagcactgccaaatatag

SEQ ID NO: 62 - DNA, 397 bp, Saccharomyces cerevisiae
atgaatggaaaagaggtttcaagtggctctggaagaacgcagagcaacaacaacaaaaaaaataacaacggaggcagtacaggaatctcgcatgcgtctggctcacctttaacggacggcaacggtggcaatagcaacggtaatagtagaagtagaagcagaagtagaaaatctagtggaactacaggtggtttgctaaaaaagccgccgctgcttgtgaacaatgaagcggtgcatgctagcgtacccgacgcgtcgcacacttcctgtaacaatggcacgcttgaagtgagcataaataaccctgagccacatgtggtagatgccgtggcacgccacttgataagaaacccgagtaacagcctacaattgcaaggcggagacattacaagagatc

SEQ ID NO: 63 - DNA, 2142 bp, Saccharomyces cerevisiae
atggtcactaacaatggagatggtgagcaccttgggatccgaagaaacggaaatttaaggcatccttccaataatatgaaaattcccagaagggctcaatcaacagttctcaattcaaacccattttatagtaggaagtattctatgtctaccttaacgccgagggatatatgtcgaagcgttgattctagagtatttgtggatatgtcttctcccaattttcagactctggaggatccccacagagatgagattataaacagtgtacggcttaactacttgaacagtagcaaaagaagttccgtctctcatggaaatgaagcaatccctagggttaatccgactaagaattcttcagcaagtaccatagctgcagcaaatgttgatagtgatgacgatgagactaacctgagtagcgctggaggcgacataacgcatgatatttacaagttggttaaagcagaggatcctaaacggctcagacgccctcggtccatggaaaatgtaacacctaaaattgagcaccatactaaattgtcatcagcaagtggtttaaatgtccccggtggcttcagaagggaatttattgtcaacaaaaaaaggcaagaacatcaattaaatgattccgctagctcagacttcacttcgcatgaaagcgattcgattaaccagtcatctccatcttctaaccaagatatcgataaggtcccctttttaacaagaaactttttggaatttctatacgtgtttggacattttgctggtgaatccttcgaggatgattttatccctgatagctcaaacatgatgatacgcggagaagatgaaaggagtgcattgctgtctcggcctgaccatatgaaagtattaccttcagccaaaggtacgacttcgacaaagaaggtttttttgatattgcttaaatctttcattggaactggcgttttatttttacctaatgcctttcataatggtggtttgtttttctcagtaagtatgctggccttttttggaatttattcatactggtgttactacatattggtgcaggccaaatcttcatgcggtgtatcctcctttggtgatattggtttaaaactgtatggaccttggatgagaataataattcttttctccctagtaataactcaagttggattctctggagcttatatgatatttactgcaaaaaatttacaagcttttcttgataacgtattccatgtgggcgtcctacctttatcttacctgatggtctttcaaacgatcatttttattccactttcgtttattagaaacatttcgaaattgtcactaccatctttactagcaaattttttcatcatggctggtttagtcattgtcattatttttacagccaaaaggttgttttttgacctgatggggaccccagcaatgggtgtcgtctatggcttaaatgcagaccgttggacgctgtttatcgggacggcaatatttgctttcgaaggaatcgggttaattattcctgttcaagactcaatgagaaatcctgaaaaatttcctttagtacttgctttggtgattctaacggcaaccatacttttcatttccatagctacattgggatatttggcatacggctcaaatgttcaaacggttatactgttgaacttacctcaaagtaacatttttgtaaacttaatccagctgttctattccatcgcaattatgttgtccacacctttgcagttgtttccagctattaaaattattgaaaataagttttttccaaagttcactaaaatatatgtcaagcacgatgatctaacaacaagagtcgaattacgtcctaattcaggaaagctgaactggaaaattaaatggctgaagaactttattcgttctataatcgtaatcattgttgtatcaattgcttactttgggtctgataatttagacaagttcgtttcagttataggatccctcgcctgtattcctttggtatatatatacccatcgatgctgcatttacggggcaatagccttccagagactaaaggggaattttggagattcaaaccaatgttagataccattttaattttcttcggtattgcaagcatgctttatacgtcttaccagagtatattcggtgtctag

SEQ ID NO: 64 - DNA, 1530 bp, Saccharomyces cerevisiae; identical to SEQ ID NO: 55

SEQ ID NO: 65 - DNA, 1347 bp, Saccharomyces cerevisiae
atggtagctagtattagatcaggtgtgctgacacttttacacacggcgtgcggtgctggtatcctggccatgccgtacgcattcaagccgtttggattaattcctggagtgataatgatagtgctgtgtggggcgtgcgctatgcaaagcttgttcatacaagctcgtgtagctaaatacgtaccacaggggagggcctcgttcagtgctctgacgcggttgattaacccaaatctaggtattgtgtttgacctagcgatcgctatcaagtgttttggtgtgggcgtctcttatatgattgtagttggggatctgatgccccaaataatgtctgtgtggaccagaaatgcttggctgttgaacaggaacgtgcaaatttcactgatcatgctttttttcgtggccccgctgtcttttctgaagaagttgaattcgttgaggtacgcttccatggtggccatctcttctgtagcgtacttgtgtgttttggtgttgttgcactatgtagcaccatcagatgagattcttcgcttgaaaggccggatctcctacctcctgccaccacaatcgcatgatttgaacgtgctaaacactcttccaatttttgtctttgcctacacatgtcaccacaatatgttttcaataatcaatgagcagaggtcaagccggttcgagcatgtgatgaagattccactgatagcaatatctttggctctcatcttatatattgcgatcggctgtgctggatacctgacattcggcgacaacatcattggaaacattatcatgctgtacccgcaagcggtctcgagcaccatcggcagaatagcgattgtgttgttggtgatgctggcgttcccactacagtgtcatcctgcaagagcttcaatccatcagattttgcaacacttcgccgaggaaaatgtaagtataagtgctacatcggcggatgaacccactgttgctaccgaaagttctccgttgattcgcgacagtagccttgacctcaatgaggtaattgaagaagaatctatttatcagcctaaggagactccattgagaggcaagagctttattgttataacgtgcagcattttagttgcatcatatcttgtcgccatttcggtttcctccttggcccgtgtactggccattgttggggccacaggctccacttctatttctttcattctgcccgggctctttggctacaagcttataggaactgagcacaagacagccgtgccattgacgacaaagattttcaaatacacaggtcttctcttgtttatctgggggctaataatcatgatcacctgcctgaccgcagctttgaagctaaactaa

SEQ ID NO: 66 - DNA, 1473 bp, Saccharomyces cerevisiae
atggaggctacatcaagtgctctttcgtctacggcgaatctcgttaagacaatagttggcgctggtacacttgccattccgtacagttttaaaagcgatggtgttctggtaggggttattcttacattattggcggcggtaacatccggtctgggtctctttgtgctatcgaaatgttccaagaccttaattaatccaagaaactcttctttcttcacattatgcatgctcacctatcccactttggccccaatttttgatttggcaatgatagttcaatgctttggtgtgggcttaagttacttagttcttattggtgatctctttccaggactgtttggtggtgaaagaaattattggataattgcatcagctgtaatcatcattcccctatgtttagtgaagaaactagatcaattgaagtattctagtattctaggtcttttcgcgctagcatacatatcaattctggtgttcagtcattttgtgtttgagctgggaaagggtgaattaacaaatatattaagaaatgacatatgctggtggaaaattcacgactttaaaggattattatcaacttttagcattataatttttgcttttacgggatcaatgaacctattccccatgataaatgaattaaaagacaacagcatggaaaatatcactttcgttatcaataattcgatatccttatcaacagcactatttttgatcgttggtttatcaggatatttaaccttcggtaatgaaaccttgggtaatttaatgttgaactacgatcctaactcaatttggatagtaattggcaaattctgtcttggctcaatgttaattctttccttcccgcttctctttcatccgctgcgcatagcagttaacaatgtcatcatctggattgagatcacttatggtggggcaaatcccgaagaggacccacaagtttcggaatacactcgtgcttccaacctaagaccaattagcatgactgtggaagatccagcccagcccagtgatgcactagacgcaacttcttataacgagcaagaatgtttactacctaacgggaactttgataatggttcaattgaaagtcaagagaacaataatgatgaaagagggactatggcggtcgccggggataacgagcatcatgcgccatttgttaagtctagattttactggattactgcattattactaataagcatgtataccttggcgttgtctgtccagtcatttgcactggttctttcatttgtaggggctacaggttcaacgtctatttcattcactttacctggattattaggttacaaattaataggcttggattctttggctattgggaagatgattccaccaaaagatagattttacaaaaggtgcagcttattgctagtcttctacggactatctgtgatgtttttgtcattgtatgtaactgtattcaaccgttcagatgaagcctaa

SEQ ID NO: 67 - DNA, 1689 bp, Saccharomyces cerevisiae
atgcaaacactagacgagacttcaaatctactccctccacctgaggaagctgaagcccctcccttggaacaaaaatttcatgaatataatttggccttacctaagtttcccattttgttttcgctatggttgggtagttttttgagttccttggatagcactattgtcgcaaatataatgaatagagttgctgaggaattctctgaatcaagtaaaaagcaatggattgcgacgagttttcttttgacaaatacggctttccaaccactatatgggaagctttctgatataacagggcggaagtcagcattattaaccgctcaatttttttttggccttgggtgcttattaacatgttttgccagaaacgtcacggaattctcaatagcaagagccatatgtggtattggtgcaggaggattgaatgctattagtagcattgctgttagtgacatatgtacagcaagagaaaggggcgtttaccagggatatgcgaatattgttttcgggtttggtcaattactaggtgctccgttgggtggtgtatttatagaaaccattggatggagggctctttttggtatccaagtacccgtgataatgttgtgctcggtattagcaatcaaaaacattaatattaagctattccatgttcctcctatgaaagaaagatataccttaaagaatctgtcacggatagatatatttggctcattaagcctggtggcgaccattagtggagttttatttttgtgctctagccagttgaacaagttgtatttagcattgtttaccattggtagctttattgtttttatcctggttgaacgttattacgcgactgagaaaattttaccattcgaactattgactcgctcattctgtttgagctcagcggtaacggttatatcttcatttgttgtatttggtgaaatctttaggtcaccaatctatttacaattgcttcaaaatattagtgtaacaaagactggcctctttttgattttcccctctatatcagttgcagtcggatcattggtaacaggatgggtattgcggaatacgaaaattaacctagcacactgtgcatatcaaatcatttttggtggtatgataatgcagctattgggtttgggattgggctatttcctactttcacacttgaatcctgactacaccatatatgatatgcttgagtctattacattcagatctaactcaatatggtggaaattgatatatgtgtttgcatcagtccttgtgtcctttggttacgcttgtctattagtggccacgttagtaagcatcgtattcaccgtcgaaaaatcacagcaaggaaccatgactggtgttttctatttgtggagatccattggtaacgttcttggtgcctctttaactttagtgtcctatgagaatagcctgtcgtccatgttatggaattatatgttcaaaaccaagcgtgatgacgaatatcacttcaccaaaaagcagtactactcccttatcaatgattcgagttacttgagagggcccaattttccaacggatatatttgttcgcattcttgatgtctacaaaaaggcattcctgatttcctatattccaaatatagccctggcagcagtgggaattgttttatcgttatatctggtgaaacatacttacaaacgtagttcaagttcttga

SEQ ID NO: 68 - DNA, 1425 bp, Saccharomyces cerevisiae
atgagtatttcaaattggatcaccactgcgtatttaattacatcaacatcttttcaacctctttatgggtcattttctgatgcacttggtcgaagaaactgccttttctttgctaatggggcttttaccattggatgtctagcctgtggtttctcgaaaaacatctacatgcttagttttatgagagcattgacaggcataggaggtggtggcttgatcacactttctacaatcgtaaattcagacgttattccaagttcgaaaagaggaatttttcaagcgtttcagaatttacttttgggatttggtgccatatgtggagcgtctttcggtggcacaatagcgtcgagcattggttggaggtggtgttttctcatccaagtacccatatctgtgattagttccatattaatgaattattatgtacctaatcagaaagaatataatcgtcaaaattctagcatattccaaaatcccggaaaaatactcagggacatagatgttatgggctcaattcttattataactggtctcacactacagcttctttacctgagcctggggtgttctacttctaaattatcatggaccagcccttctgtgctactgctattagttgggagtgtaataatcctcttactgttcatattgcacgaaaggaaaacaagtgctagagcgattattcctatggagctggtcaattcctcctacagtgtcgttgtactttcgataagtatacttgttggttttgccagctacgcgtatctttttactttaccattattctttcagattgtacttggagattccactgcaaaagcaggattacgtcttacgattccttccctatttactccggtaggcagtctcataacaggattttccatgagcaagtacaactgtctaagattattactctacattggtatttctttgatgtttttgggtaactttttattcctgtttattgaaaaaacttctccgaactggttgattggtctatttttgatacctgcaaatctaggacaaggtatcacttttcctacgaccttgtttactttcatatttatgttctctaagagtgaccaagctactgcgacatcaactttatatttattccgtagtattggatctgtatggggtgttgcaatttcagctggcgtcattcaattatctttcgcaggtttattgcgtagtaatttgaaaggtctactggatgaaaacaagataaagaaacttattgttcagcttagtgcaaactcctcatatattggatctttacatggcgaagttaaaaacacagtcataaagagttttgatgaggcaacaaagagggctcatctaatgtctacattactctcttcattggccctgatactctgcatccttaaagacaatctggcgaaacctaaaacaagaagataa

SEQ ID NO: 69 - DNA, 1377 bp, Saccharomyces cerevisiae
atgaatatgctcattgtcggtagagttgttgctagtgttgggggaagcggacttcaaacgctttgctttgttattggttgtacgatggttggtgaaaggtcacgtccattggtgatttccatcctaagttgtgcatttgctgtagctgctatcgttggtcctataatcggaggtgcctttacaacccatgttacctggaggtggtgcttctatatcaatcttcctatcggtggtcttgccattattatgtttttactcacatataaggccgagaataagggtatacttcaacaaattaaagatgctataggaacaatctcgagctttacttttagtaagttcagacaccaagttaattttaaaagacttatgaatggcataatcttcaagtttgacttctttggttttgccctctgctctgcagggctggtccttttcctactggggctaacctttggtggtaataaatatagttggaactctggccaagtcatcgcatatttggttttgggtgtcttactttttattttttcattggtgtacgatttcttcttattcgataaattcaacccggaacctgataatatatcctacaggcctctccttctaagaagattggtagcaaaaccagccataataataataaacatggtaacatttctattatgtaccggttacaatgggcaaatgatatactctgtccagtttttccaacttatatttgcgtcgagtgcatggaaagccggtcttcacttgataccaatcgttattaccaacgttattgcggccattgcaagtggtgtgattaccaaaaagctcggtttagttaaaccactcttaatatttggaggcgttcttggggtaattggagcagggcttatgacacttatgacaaatacgtccacgaagtcaactcaaattggtgttttgctattaccggggttttcccttggatttgctctacaagcatcgctcatgagtgcacagcttcaaattaccaaagatcgtccagaagctgctatggactttattgaagtaacagctttcaatacattcatgaagtcattaggtacaactcttggtggtgtgctttcaaccactgttttttccgcctcctttcacaacaaagtatcacgagctcatctagagccttacgaaggaaaaacggttgatgacatgattttgtatcgtcttcaaaactacgacggttctcattcgactattggaaacattttaagcgactccattaagaacgtattttggatggatctagggttttatgccttaggatttttgttttgtagtttttcatccaataagaaattaatcataccaaaaaaggacgagacaccagaagataatttagaagacaagtag

SEQ ID NO: 70 - DNA, 2307 bp, Saccharomyces cerevisiae
atggggaagaaggatagacagcgcaagaaactgcgtgagtttgctaaattgaaaaacaggcagcgaaacttgagaaagagcgtgcaaacattgaagaatgaggttcaacgagaggctaaagtcccaagaacttcgaatcaaattgctttaggaaacgacaaaatcgaagagattaacgaaaatagtccattattatcagctcctagtaaacaagaggaggtatcaattccgaaagcggttgatattgataccattgatgcacagcctcttcacgaaggcccaaaaattgatgactcgccccaagatgaggtcaatagcattaaaggaaaacctgcggacaaggctaatgaagacgatcttaagccgccttcacaacatgaagcatgtggaaattcagctttgcaaagctctattacagattttagtgatagatcagtatcaccattgcaaagtattaccagctgcaatactccgatgagtgagcacgagctaccagtatcttcctcaaattcgtttgaaagagctgatgatatgcctgtagtgcaggcagataaccagacgtcaagtagtaaatctttgcacattgttgcaccatctcctgaagtaccagtcagcggagatgaaatcacttcatatggatatggctctataccccagagcatcggggatgtagagaacggattgaatcctccttatgtcgaaaatacatcatctgatgaacttgtacatgatctgacgagaagacggatattttcatcctgtatgtgtacttatttattctttattgcaatggacagttctataatcctagtaattgcgtccaaaattgcttcggagtttcatgagttatggagattatccttagtcatctcagcatacctattgagtaatgctattgggcaactggtatttttgaagctatctttaatatccagtgtaaaattgttgttgtgtattgctcaattcagttttatccttggtggctatttatcttggagttctgcccatttttggacgtttatctttgcccgttgtgtcacaggatttgggggcggttccttaatagcgctcaaaagtactattatgaatcggttttctcaaaagaacgacagtcggtactcattgagtgcctctatgataacatttgctatgggtgtggtaattgggccctttatgatgaacttgtttgattcttctcatggtagcgggtggagaaatgccttcttaataccagttcctttttgccttgtgaatgcctcgattatgctggcagatatgtattctgttaagagcactttatatggacgcccaacgcctacattatggaaaagattcaagaatactctattaagtcctgatttatacgaaatattgacacttacgctattcctactttgtttcgttcaagtgacctcattggatttaacagggttaaagaataatacgatgattcaagcgctactattttctgtaattatcgtttgtggcattttatttttcttgatagagacaagcgatacttacatgaactctgtaatttcaatgtccttacaaggtgacaagcgtttaatatggacaatgataggaatttcattttgctttgcagcattaatgtgcatcatcccattcggtacaacgtacttcatcattgttttaaatttaagcactttacaacttgcagagagattgtccccattctttttctccattgtactgggttactttagtgtttcttatttttggaagtcgaaaggacagaattttttgctaaaatttgttttaagcggagccaccctgttactatatgtggcacttatgggggtaagtttgaatttaccagtatggaagcaatatatatgtttgtctctgccatttttgggctcctctatgatattgaccttgctgtcaaatctttatcatgagtaccatgaacaaagaaagtcacctatcagtggttctatcgtatattgtttcggtgccgtgggggggacggttggtatttccttgggtggttatgtcttccacaaaacattaataaaacttatgcatgagaaggtgatgccatttagcaagcaaggttatcttaaaaaggaccttttgaaaattatcaagcacgctacggaatcttcagattgggtacacgaatcagccccaaagtttgtttttcaaactttgattgagtgttatttacaagcatgtcgaaacgtattcaaactctctacccttttttttacgattactgtcgtagcaatattcattttcaacagaatccattgtcgtagtcaaaattgtttgtcactatcttga

SEQ ID NO: 71 - DNA, 1749 bp, Saccharomyces cerevisiae
atggaggaaactaagtactcttcgcagcaggagatagaaggagcatgtggttcagacgcttcattgaatgctagaggtagcaatgattctccaatgggactttccttgtacctctgcctggcttcgttaactcttgtactattcataactgcactggatattttgatagtgggaactattattgacgtggtcgcagaacagttcggaaactactccaaaacaggttggctcgttacaggctacagtttaccaaatgctattctgagtctcatttggggaagattcgcatctatcataggtttccagcatagtctcattttagcaatacttatttttgaagccggatccctaattgctgcccttgcctcttcaatgaatatgctcattttcggtagagttgttgctggtgttgggggaagcggactccaaacgctttgctttgttattggttgtacgatggttggtgaaaggtcacgtccattggtgatttccatcctaagttgtgcatttgctgtagctgctatcgttggtcctataatcggaggtgcctttacaacccatgttacctggaggtggtgcttctatatcaatcttcctatcggtggtcttgccattattatgtttttactcacctataaggccgagaataagggtatacttcaacaaattaaagatgctataggaacaatctcgagctttacttttagtaagttcagacaccaagttaattttaaaagacttatgaatggcataatcttcaagtttgacttctttggttttgccctctgctctgcagggctggtccttttcctactggggctaacctttggtggtaataaatatagttggaactctggccaagtcatcacatatttggttttgggtgtcttactttttattttttcattggtgtacgatttcttcctattcgataaattcaacccggaacctgataatatatcctacaggcctctccttctaagaagattggtagcaaaaccagccataataatagtaaacatggtaacatttctattatgtaccggttacaatgggcaaatgatatactctgtccagtttttccaacttatatttgcgtcgagtgcatggaaagccggtcttcacttgataccaatcgttattaccaacgttattgcggccattgcaagtggtgtgattaccaaaaagctcggtttagttaaaccactcttaatatttggaggcgttcttggggtaattggagcagggcttatgacacttatgacaaatacgtccacgaagtcaactcaaattggtgttttgctattaccggggttttcccttggatttgctctacaagcatcgctcatgagtgcacagcttcaaattaccaaagatcgtccagaagctgctatggactttattgaagtaacagctttcaatacattcatgaagtcattaggtacaactcttggtggtgtgctttcaaccactgttttttccgcctcctttcacaataaagtatcacgagctcatctagagccttacgaaggaaaaacggttgatgacatgattttgtatcgtcttcaaaactacgacggttctcattcgactattggaaacattttaagcgactccattaagaacgtattttggatggatctagggttttatgccttaggatttttgttttgtagtttttcatccaataagaaattaatcataccaaaaaaggacgatacaccagaagataatttagaagacaagtag

SEQ ID NO: 72 - DNA, 1587 bp, Saccharomyces cerevisiae
atgagctatggaactataaatgatatgaatgaatcggtaacgaactatcgaataaaaaaagcccaaaacaatatcaagggatggtacgcttactcattttctagcgaaccatttgtcgtttctgcggtttcaacgtatattcccttactactgcagcaatttgcgagtataaatggtgtaaaagttcacgatcactccataccctgcctgtcagaaacgggtagtgattcagataagtgtgttcttggtttgttcaacaatcggatcttcgtagatacttcaagttttgcattatatgtcttttcccttagcgttttattccaaactataatagtcatttccgtttcagggatagtagatctctgggggagcgttaaattcaaaggcagaattctggtttggtttggtattgtgggcgcattgtcgactgttgcgatttcaaaattgaatgatacccagatttattctctggctgggctttatatagtggccaatggttgttttggcgttatcaatgttgttgggaattctcttctgcccatttttgtcaaggattctttgaaatgtcaaagtcaaggagcttatgaacctgataaggtagactcgttaactactgttattagcggtagaggtgcatctttaggttattcaagtgccctcattgttcagattgtatctatgttcttagtcgcatctaaaaagggcagtaagcaggatgttcaagtggctgttcttttcgttgggatttggtggtttgtgtggcaactgcccatgatctggttgattgacgatgtgacaataccgataagagttgacgattctacattagcatccgcccgcagtccgtatcccggtgagcaagacgccttgggtcaactaaactggaagaattacctttcatatggttgggtttcgcttttcgaatcgtttaaacatgccagactattgaaagatgtgatgatttttcttattgcgtggtttattattagtgattccattacaactataaattctacagcggttttgttctccaaggcagaactgcacatgagtaccctcaatttaatcatgataagtgttttgaccgttgtaaatgcaatgctgggtgcctttatgattccacaatttcttgccacaaagtttcggtggacttctagtcaaactttgatgtacattatcatttgggcaagtttcataccattttatggtattcttggatttttcttcaatgcgttcggtttaaagcataagtttgaaatgttcttattggccatttggtatggattatcactaggtggcctgtccgcggtttcaagatcagttttcagtttgattgtacctccaggaaaagaatccacgttttttagtatgttcagtatcacagataaggggtcgtccatcctgggacccttccttgttggactgcttaccgataaaacgcataatattcgctattcgttttatttcttctttttgcttttgatgctatcattgcctgtgctaaactgtttggatgtcaagagaggtagaagagaggctgaagaactcagtcaagttttacctgaaagtgaaagaaggttggattag

SEQ ID NO: 73 - DNA, 1773 bp, Saccharomyces cerevisiae; identical to SEQ ID NO: 11

SEQ ID NO: 74 - DNA, 1836 bp, Saccharomyces cerevisiae; identical to SEQ ID NO: 13

SEQ ID NO: 75 - DNA, 891 bp, Saccharomyces cerevisiae
atgaagctgatcccaattattttgaatgctaagaatctcagtgggatggctggatccatatcaatatgctgttggattgttgtgtttgtaccacagatttatgaaaacttccgaagacagtctgcggagggattatcactgcttttcattgtgttgtggctattaggtgatatatttaacgtcatgggagctatgatgcaaaatttactcccaaccatgataattttagctgcttactatacattggcagatttaattttgttaatacagtgcatgtggtatgacaaggagaagaagagcattttacaagaagtcaagaaaaatgttgatcctgtgcatttgcctccagcaaaccccataaatgagactgtcttacaagacgtttttaatgaatatgagccacttttgccaaggatagaagaagaagatagccaatcgtatagctcgcttgagcttggcagaacaatagtcgtaaaggaaagagagaattttttcaatgacttcttaattgtttcaggtgtacttattgccggaattttgtcatggtatatatcttactgttccggcctagataacggtattcctaaaaaaaaacctgcgttcgaacagattaatttacctgcacaaattttagggtatttaagtgcgatactgtacttgggctctaggatccctcagattgttcttaacttcaaaagaaaatcatgcgaaggagtctcattcctattctttttatttgcatgcttagggaacacttctttcataatctcagtgctctcagcatcttggcttatcggtagcgctggtacgctgttgatggacttcacagtttttattcaatttttcctttacgccaaacctaaatacgagaaaatactaatagataattaa

SEQ ID NO: 76 - DNA, 2178 bp, Saccharomyces cerevisiae
atgcctcaatctactccaagtcaagaagtacagcgtgtaccatgggataataaacctgctttgaagcagataacactccgagcaaccatagcaggtatcgctatagggtctctggtgctaacatcaaattttcaatttggcctgcaaaccggttgggtttccatgatgtccctgccatcggcattgttagcttgtgctttctttaaaaatatctggccattaatatttccgaacgacaggcctttcagtgacgttgaaaatgtatacgtacaaagtatggcagtagctgtcggaacaggcccattagcctttgggtttgtcggcgtcatacctgccatcgagaagttccttactaacgacgaaagtggtggattaagggaacaaggacagtccttcacttttagagaattgttaatatggtccacagccctagcattcttcggtattttttttgcagttcctctaagaaagcaagtaattgttagagagaaacttcccttccccagtggtagcgccacggccactttaatttcagtgctaaatggaactgagattttacaagaggtttctaagtcagagttattggaaatgaggcagaggagattgaatgaatgccctgaagtgctacaacccaacagagatccagaggaggcggattatttaatgaactcttctcatagcgaacttggtgattatacggcaactagccaagatggaagttctatcctttctactggctctgagaactacagagcgaatattattattttattgaaaacttttgttgtttcttcgctttacaccatggtgtcatattttgtaccggtaatacggtctattccagtcttcggaaaatacctctcgaacaattatctctggaattttcagccgtcgcctgcgtatataggccaagggataataatgggtcttccaacagtatcgtatatgcttatcgggtgcttcttaggctggggtgtgttagcaccattggcgagatacaaaagatgggtaccaccagatgctgatgtccacgactgggaggagggagtgcaaggatggattctttggtcgtcgctttcaataatggttgctgacagtgtagtcgcttttattgttgtgacagtgaagtccattgtgaaatttattcttatagatgacaaagctgctttactgaacaacataatcgatgatacatttcaatctatgttactggaggaggaacgcgccattaatagcagcagaagaaatacatatgttgatggaaggcaggacaccgtaagattagtgagtagagataacgaaatagaagtagattcgaagcatttggttcgctataccaccgttatcagtggatgtctagtctcctcgataatatgcattgtttccataatatatttgtttgggatacaagtaattcccctatatgctattatcactgctttgatacttgcgttgtttctatctattctcggtattcgagcacttggagagaccgatctgaatcctgtgagcggcattggtaagatctctcaattgatttttgcctttatcataccaagggatagacctggatcagtgttaatgaacgtggtatcgggaggtattgcagaagcctctgcccaacaggcgggcgatttaatgcaggatttgaaaacggggcacctcctcggcgcctccccaagagctcagttctgtgcccaattgataggggcctgttggtcaattattttgtctagcttcatgtatttgtgctacaataaagtttattcaattccgagtgagcaattcaggataccgacagcagtagtgtggatagattgtgcaagactagtaactggtaaagggctccctgataaggccttggagtgctccatgattctcggagtcatatttgccgttttatcattaatcagaaacacttatagagattacggatacgggtggatattatatattccgtctggtgtagcagtcggtgttggtatatttaattctcccagttttacaattgcaagattcatcggcgggtgggcttcgcatttttggttgaagaatcataggggtgacttaaatgcgaaaacaaaaatgattgtattcagttcggggttggtcttaggtgaaggtatctttagcgtaataaacatgctcttcatctgcttaaatgtccctcactattag

SEQ ID NO: 77 - DNA, 2208 bp, Saccharomyces cerevisiae; identical to SEQ ID NO: 42

SEQ ID NO: 78 - DNA, 1755 bp, Torulaspora microellipsoides
atgtcaaagctcatccctatcgctagtcctgccctatcgatgatgacatcgagggcttatgacgaggtaaaaaatgaaaatgtagaaaaaggagaacaagggagcgtcgacgagaaaggagaatatgttgacgtcttgggccgtgagatcatctcaagtgaaaccgagaagcatggcaaccttccgctgcaggcttatgtccactacgctgggatccagcgtgaattcgagagagaaagagatgaagatggcctgtatgctgttcagagagaacagatgtatacagaccctcacagcaatgtctcaccatcgaagcttgattcacagagaatgctgcgcatagctaaggcatattccgtgttctttttaatcactaccgatattctgggcccatctaatgctccatatgctgttgcccaaatgggatgggtaccaggagttatcctttatgtcattttcggtgtcgctgctgcgtttggcggttggttgttgaacttctgcttttgcaaagtcgactctaacaactatccaattcgtacattttctgacctggctgcgcgtgttgttgcgccttggttccggtatccgttcgggcttctacagtttattcaaatgatactaaattgtggattactacttttaagcaccgctcaatctgtgtcacagatgctagttgtaaacagaggcggagatcacttctgctttaccgttgacattttagtgtggggtctcctatgtatgatcatgggccagattcgttctctcggcagatttgcacatattgcaaactctgccgtgtggatgaacatcgcaatctgtattatcacaatggtcggtgttgctctgggaggtccttactacggtatttttgaacaatatgggcaaggcgccccttacttccaacctagtagttacatcccattgccaattaaacaatacgccatcgtgcctggtaatattagtgataaaattgcaggtatgaacaatatggtttttgcttggggtggtgccacgattttctgcgaggttatggcagaaatgaggcgtccaatggacttttggaaaggtatgctctgtgcgcaatctctaattttggtcgtttatcttttctacggacttttcgtgtatgcttacaatggacaatttagttatgtgactgcaaacatggccattggctccataggattgcagaatgccggtaatgttctcaccatcataacaggtatcattgctatggtactgtacgggaatattggtattaaagttatctaccaaggttttctggtaacagattttaacttccccagccttacctcgcgcaagggaaccttcgcgtgggcaggatttgtggttgtctactgggccatcgcttatattcttggaacagctatcccatctattagcgctcttgttgcgattgtaggtgctttctgtatcctgaatttctcatacactttcccatttctttttggattctgcctgttatgccgccaagatgcggcattggccgacaacttcgatgctaagactctaactgtggagaaagctgactcatatcgcagctggtctaggtggaagcgtgctttagggtatggaggtacttaccgcattttgattaaagtttcgctctttttacttttcctagcctcgctcgcaacttgtggcctatgttcctactcagcaatttcgggagctatcgcagtctatcaaaccaatcctgcacaaccattcacctgcacttctcctgtggcctga

SEQ ID NO: 79 - DNA, 1752 bp, Torulaspora microellipsoides
atgtcaaaacttgtccctatcgctagtcctaacctatcgatgatgacatcgagggcctacgatgaggcgaagaaagaaaaaggatctcaagggaccattgatcatgagaaaggagaatatgttgacatatccggccgtgagatcatttccagtgagagcgagaagcatggacgccaactaccactgcaggcttatgttcactacgctgagatccagcgtgaattcgagagagaaagagatgaagatggcctgtatgctgttcagagagaacagatgtatacagaccctcacagcaatgtctcaccatcgaagcttgattcacagagaatgctgcgcatagctaaggcatattccgtgttctttttaatcactaccgatattctgggcccatctaatgctccatatgctgttgcccaaatgggatgggtaccaggagttatcctttatgtacttttcggtgtcgctgctgcgtttggcggttggttgttgaacttttgcttttgcaaagtcgactctaacaattatccaattcgtacattttctgacctggctgcgcgtgttgtagcgccttggttccggtatccattcggtcttctacaatttattcaaatgatactgaactgtggattgattcttctgagcactgcccaatctgtgtcacagatgttggttgtaaacagaggcggagatgatttctgctttacagttgacattttagtttggggtctcctatgtatgatccttggccagattcgttctctcggcagatttgcacatattgcaaactctgccgtgtggatgaacatcgcaatctgtattatcacaatggtaggtgttgctgtggggggtccttactacggtatttttgaacaatatgggcaaggcgccccttacttccaacctagtagttacatcccattgccaattaaacaatacgccatcgtgcctggtaatattagtgataaaattgcaggtatgaacaatatggtttttgcttggggtggtgccacgattttctgcgaggttatggcagaaatgaggcgtccaatggacttttggaaaggtatgctctgtgcgcaatctctaattttggtcgtttatcttttctacggacttttcgtgtatgcttacaatggacaatttagttatgtgactgcaaacatggccattggctccataggattgcagaatgctggcaatgtgctttccattatatctggtataattgctatggtgctttacggtaatattggtattaaagttgtttaccagggttttctggtaacagattttaacttccccagccttacctcgcgcaagggaacattcgcatggggaggatttgttattctgtactgggctgtcgcttatattcttggtacagccattccatctatcagtgcattggttgggatcgtcggtgctttctgtatcctgaatttctcgtacacattcccatttctttttggattctgcctgttatgccgccaagatgcggcattggccgacaacttcgatgctaagactctaactgtggagaaagctgactcatatcgcgagtggtctaggtggaagcgtgctttagggtatggaggcatttaccgcacttcgattaaagtttcgctctttttgcttttcctagcctcgctcgcaacttgtggcctatgttcctactcggcaatttcgggagctatcgcagtctatcagaccaaccctgcgcaaccattcacctgcacttctcctgtggcctaa

SEQ ID NO: 80 - DNA, 2718 bp, Candida albicans
atggatgaaaaaaatccaacaacagaattaagtgtacccaacatagaagcagttggaagtcatttacaagtccaagatcatgagattaatttacaagcgatcatatctaatcctctttccattggtgaagttgctactacattaactgaatcccaaaaatggtttgttttaaaaagattacattttgatgctttagtgtcattagatgaattaccacctcaagctagttttatatttgaaaaaattgaacaaatgaccactgaagaggcggttgaaatattagaaaaaaacattgaagagcacgagaccgatgttaatattccagaaaatgatttagttctttggaaagagttagttgaaaattcacataagttcaccaaagttcaattacaagaaaaattgggtagtaactcatcgtcatcagtggaaggtgagaagacagctgacgtcgaaaaaggtcacgaaattgttgattgggatttgcaagttcgtttagaagcagtattagttgcttattggtctccatatcctgaggttagagcagttactttcccatatgatgatccaactattcctgctgaaacttttagagtttatttaattgcaatcatctggaccgcaattggtgctgttatcaaccaattttttgttgaaagacaacctgctattacccttgccatgtcagttgtgcaagtgtttctttacccatcagggttactctgtgaatggattttaccaaaatggaaatttaaaatttggaaattgagtattgatttaaatccaggtccatatacatacaaagagcaaatgttggccactatcttttgtggtgttactggtggtggaacttcttatgtttccagtaatattcttatgcaaaaatccgaaatcttttacgacaataaatgggttgactttggatatcaagtattattaatcttatctaccaatttccttggtattggtcttgctggaataatgagaaaatttgccgtttacccaactaaagccgtatggccatccattttaccaggtttagcattgaataaaactttattaactccagctaaaaaagaagtaattaatggatggaaaatatctggttataattttttctttattgcatttgttgcctcatttctttatttctgggttccagattatttattccaagctttatcaacttttaattggatgacctggatcaaacctgataaccaaaaccttgcagtggttactggttcagttggtgggttaggattaaatccaattactactttcgattggaattatttcagttctatgcttcaaccacttcaagttccattcttttatccagttaataatattattggtatggctattgcattcttctgtatcatcggtgtttggtattctaattataaatggacaggatatttaccaatcaacgataatggtctttatacaaatactggagaaccttattctgtgagactggttgttgatgctaatagtttatttgatcaagcaaaatatgctgaaatgggtccaccattctataccgctgccaacttggttgtatatggtgctttctttgccatttacccattccactttgtttacgaacttggtatgaactacgatcaaatgtgggatgcttttaagtccttctggagagtaattaaggactataaaaaatcgacctacgacggctttgatgatccacatagtactatgatgagagcctaccctgaagttccagaatgggcttatttaattattgttgtcatttctttggtattggccattttgtgtgtcaaagtttatccagctgagacaccagtgtggggtattttcttcgcattaggtattaactttgtgttcttaattccattaactaccatctacgccagaactggatttgcatttggattaaatgttttggttgagttaattgttggttacgccattccaggtaatggattagccttagcattcataaaggctttaggttataacattgatggtcaagcacaaaactttgttaatgatttgaaacaaggtcattatgctaaactcccaccaagagctgtttatcgtgttcaattattatctattttcatatcatctttcattcaattgggtatattgaatttccaaattaatggaggtattaaagattattgtgaacctggcaatactcaaaaattcacttgtccaagcagtagaaccttttattcggcatcggtgttgtggggggttattggtccaaaaagagttttcaatggtttatatccaattttgagatggtgctttttaattggattcttgattgcattcccatgtattgccatcaagaaatggggaccaagaaaatatgttaaatatttcgaaccttcaattatcattggtggattcttaaactatgctccatataatttgtcatattatatccctggtctttatgtatcatttacatttatgtcatacattaaaagaaaatatgaagcatggtggcagaaatatacttatgttctttcaactggtttgaatgctggtattgccttttcatcaatcattattttctttgctgtgatgtatcatgaaaaagatattaactggtggggtaatactgttatgtattcaggtgttgactatgctatgacaggttggttgaatgccacagttgatgcaccagatggttattttggaccaagagttggtcacttcccttag

SEQ ID NO: 81 - DNA, 1101 bp, Candida albicans
atgaattatgaccaaatgtgggatgcctgcacatcattttggcgggtaataaaagatttcaggaagtcgacatatgatggttttgatgatccacacagtactatgatgagagcatatcctgaagttccagaatgggcttatttgatcattgttgtcatttcattagttttggccattttgtgtgttaaattatatcctgcccagacaccagtgtggggtattttctttgcattaggtattaactttgtgttcttaattcctttaaccactatttatgccagaactggatttgcatttggattaaatgttttggttgaattgattgtgggttacgctatcccaggtaacgggttagccttagcattcataaaggctttaggttacaacattgatgcacaagcacaaaatttcgtgaacgatttaaaacaaggtcattatgctaaactcccaccaagagctgtttatcgtgttcaattattatccatttttgtatcatctttcattcaattgggcattttaaatttccaaattaatggcatcaaagattattgcaagccagggaatactcaaaagtttacatgccctggcggtagaacattcttctcagcatcggtattatggggagttattggccccaaaaaagttttcaatggattatatccagtattagcatggtgtttcttgattggatttttattggctttcccttgtattgccattaagaagtatgcacctaggaaatatgttaaatactttgaaccttctattgttattggtggattcttgaagtatgcaccatataatttgtcgtactatattcctggtgtttatgtgtcgtatgcatttatgtcatacattaaaagaaaatacgaagcttggtggcagaaatatacttatgttctttcaactggtttgaatgctggtattgccttttcatcaatcattattttctttgctgtgatgtatcatgaaaaagatattaactggtggggtaatactgttatgtattcaggtgttgactatgctatgacaggttggttgaatgccactgttgatgcaccagatggatattttggaccaagacgtggtaatttcccttga

SEQ ID NO: 82 - DNA, 2766 bp, Candida albicans
atgtctacagagaaaccaattcctgctcttcctgttactagtatcaccagtcatgttgacgtggctgctcatgaagtgaaccttcaggcaataacatcaaaccctctttctattggcgaagttggtactacattgacaaatggtcaaaaggatttcatccttaaaagattacattatgattcgttggtttcttttgataaattgccacctcaagcaacatttatatttgagaaaattgaacatatttccattgaagaagctttagctatattggaaaaggctgttgttgaacatgaaaacgatgttaatattttagataacgatgaagagttgtggacaaagttgatcaactataagcaagggaaaatcccttcagatactgacttttctgaaaaagcacatccatctaatttcactgcaaaagacaaattgtcggcattcattcatgagaaaagggtatcagaagaaacctcatcattagacaacagtgccagtgagaatcttaacgaaccttattataagattgtcgattgggaattgcaagtcaaattagaagcagtgttgattgcttattggtcaccatatccccaagttagaggtgtgactgacccttatgatgatccaacaatccctgttgaaactgttagagtttatattgtcgctattatttggactgctattggtgctgttattaaccaatttttttctgaaagacaacctagtattggacttggaatgtcggttgttcaagtgttcctttatccaactggtttaatatgtgaatggattttacccaaatggaaatttaaagtttggaaatacactattgatttaaaccctggtccatatacttttaaggaacagatgcttgctactattttctgtggtgtttcttctggtacttcgtatgtatcatctaacattttgatgcaaaaatcagaattattttatgataacaaatgggttgatttcggttatcaagtattgttaacattgtcaacaaactttcttgggtttgggctttctggaataatgagacagtttgctgtttatccagaaaaggcaatttggccatcgattttacctaatgtcagattaaataaaactttaatgtcgcctgaagtgaaagcaagaatcaatgggtggagtatttctggttataatttctttttcatcactgctggtatttcatttttatatttttggattcctgattatcttttccaagcgctttctcaattcaattggatgacatggattaaacccgacaattataatcttgccgttgtgacaggttcctttggtggtcttggattgaacccaatcccaagttttgatatgaatgttattggtactggtggattcattgctccattttataatacattggagagttatattgggatggtacttgcacttttttgcatattaggtgtattttactcgaattacaaatggacgggatttcttccaatcaattcaaatcgtctttttacaaatgaggggaaaccatatcatgttactgcggttgtgaattctaactccttgtttgatgaagaaaaatacaaggaggtgggaccaccattctattctgctgggaacttggttctatatggggcattttttgccatttatccgtttcattttgtttacgaaattgcaatgaactataagcaaatgtgggaagcacttcaatccttatacaagggtattagaaatttcaagagatctacttatgaaggttttgatgatcctcatagtgttatgatgagagcatatcctgaagttcctgaatgggcatatcttatcattcttgttatttcattggtattggctatattatgtgtcaaattatatcctgctgaaacaccagtttgggggattttctttgccttggcaatcaactttgtgtttttgattccattaacaactgtgcaatcaagaacgatgtttggatttggtcttaatgtgttagttgaattgattgttgggtatgctattccaggtaatggattggctttagcatttataaaagccttgggctataatattgatggacaagcacagaatttcattaatgatttgaaacaaggtcattacgctaaacttccaccaagagcaatgtacagatgtcaattattgtctgtatttattacttcattcattcaattgggtattcttaattaccaaattactgggattaaagattattgtgttcctggtaataaacaaaaatttacatgtcctggaactacgacattctataatgcttcagttttatggggggttattggacccaagaaagttttcaatggattatatccaattttagcttggtgtttcttgatcgggttcttgttggctttcccatgtattgctttcaagaaatgggctcctagaaaatactccaaatattttgaaccttcgattattattggtggatttttaggttatgctccttataatttgtcgtacaatactgggggtctttatgttggttatgcatttatgcattatgtcaaaagaaagtatgaagcttggtggcagaagtatgattatctcttagctacagggattgatgctggtattgccttttcatcaatcattattttctttgctgtgatgtatcatgaaaaagatatttcctggtggggtaacaatgttccatttgaaggatgggacgcttcaatgaccaatggatatttgaatgctactttacaggcacctgatggttattttggtccaagagttggacatttcccatga

SEQ ID NO: 83 - DNA, 2838 bp, Candida albicans
atgacgaaaaaaggacacgaatacattcaattatcaacattttcagaacacgaaaatgaacatgaacctgaatcaagttcaactacatcatcacctccaccaccaggtatacgtcaatatgaaaaacaacatgaatggaatttcacagatttacaattacaatttgtccttttacgattaggtgtaattagtgatgaagtttatcataatcagaatttttcactcctggaccctgatattcatatttccaaagaagtagaatatatgattaataaaattgatcaattatctatatcagaagcaattgaaattattcgtgatgcattagcggatcataacggggatgttaatttcttaattgaagattatcaattattagaaagattaattagtcaaatccccaacaatattgaatctcaagaaaataaccaaaacgtcgagacaaatctcgatgaactacctgaaatgaaatatccaatgcaatcaacatttaaaaacaagacttacttaactatcattgattggtcattacaaattcgattagaagcagcattaattcattatcattcaccatatccggaaatacgagccattacagatccatttgatgatccaaatactcctgtggaaacatttcgagcttatttcattgcattgttttggacatttattggatcgttaattaacagttttttctatcatagaatgcctggtatatcattaggtactcatactatacaaattttgttattacctagtgggaaactttgggaaaaattaatcccattaaataaaactattactattaataatacaaaaatcaatttaaatcctggaccatggaattttaaagaaatgatgttgagtacaataatttatctgtgttccgcttcaactccatatctgatcaataatatatttgtgatgaaattagatcgattttatggattaaaatgggttaattggattttccaaattttattcaccgtatctactcaattacttggtttcagttttgccatgattatgaaaaaagtttgtgtttatcccagtaaggcaatttggccaacaatcttaccaacaatagctttaaatagagcattaatgaatcaagataatgcttcgaacaatagcattgttcatggttggaaaatatctccttattcatttttcttggtgactttcactcttagtttcatatataattggatccctagttattttttcaaagcattatcattatttaattggccaacttggtttaatcctaacctgattcatttagttaatatcacagggtcgaatgttggattgggattcaatccaatcccatcatttgattggaatgttattggtggttcaagtatggtgattccattttatacatttgtgaatcgttatttaggaacattcttgggatttattataattttaattgtttattatacgaataataattggacagcttatttaccaattaattctaatcgattatttaacaacaaggctcaattatataatgttcatgatatccttaatgatgataataaactttttgataatgaaaaatatcaacaaattggtccaccgtatttttctgcagcaaatttggtgatttatggtgcttatttttgtctttatccatttgctatattatatcatgggttaaccgaatggaattctatgaaaacaagttttattaatgtttggacttcaatagttgatgcctttaaactggagtcggagatgggcgtaagcgttgaatcaaatgatgataataaccttctgttgcatcgacaatatggtagatatgctaatgatccacattgtaaaatgatggctcattatcctgatgtacccgattggtggtttataaccattttggtggtaagtaccctgtttgctatagctgcagtatggttttacccggttgaaaccccaatatgggggatttttttcactattgccattaatttcatttttttaattcccttaacatcaattgcatccgtcacggggttttcatttggattaaatgttcttgttgaattaattgtcgggtatgctatacctaattctggaattgcattaattacattaaaagcctatggatataatattgatagtcaagcaagcaattatattactgatcaaaaattggctcattatgcgaaaatcccaccacgagcaatttttaaaggtcaattattatccactttattaaatattataatttcattaagtgttgctaattggcaattaaataatgtggaaaatatttgtgatcctcatcaaaaggataattttaaatgtcctggagctaatacatatttttattcaagtattcaatatggagaaattggtccagcaaaagtttttggaggattatatccaattttaaaatggtgtttccttttgggggtattattagttttcccctgtgtttggttgaaaagaaatggtccaacaaaaatattccaacgttattttcaaccaacaattataattggtgggatgttagattttgctccttataatttactgtattttactggtggcttatatatatcttatattttcatgttttatattaaaaaaaattatttactttggtgggaaaaatataattatattttaactagtgctttatcagctggtgttgcttttagtgctttaataatttttttcaccgttcaatatcatcctcatccattacattggtgggggaattcaattggtcaacaaggtattgaaggtggtgaaatttcaccaatttggaaaaatatcgatactgctcctgatggttatattggtttaagaaaaggtcatttcccatag

SEQ ID NO: 84 - DNA, 2244 bp, Candida albicans
atgtccaaagaggctgaatttgttaaaacaatttccaaggaaggtgatccacaggtggatgttcttgaaagagacgctgagtctaattctgaaaatgctttagaacctgatgttgaagagctaccaaaggtggtcagagagattgttccattggaagatgatcctaccattccggtgcttactttccgctactttatactatcaataattttcatcatacctggggcatttattgatacgatgaattctttccgtacaacgtcagcagcatattcaattttttttgttcaaatcgcatcacattggtgtggcaaatggctagctagaattcttcctaaaaagcaagttggttttggaagattgtcgttcaatttaaacccggggccctggtctatcaaggaaacggctttgattacaatcaccgcaaatagtggtgcaacggggagcatgggtaccaatcctttggcgttggcagaacttttctatggtgaaactgtcaaccctgctgttgccattttcttcatgtggatgattgtgtttattggttactcatttgctggtattgccagaaatttcttattgtatgaccctcaattcacatggccacaagctttgatgcaaacaacattatttcaaacccaaagtaaaagtgacaaagatgccaagcaagcatcaaagcaaatgaaagtgtttttctttgtcttgattggtttatgtatatggcagtttttcccggaatatatattccccatgacttcttcgttggcttttctttgttgggttgcgccagaaaactatacagccaatttcattggatctggtcttggtggaatggggtttcttaatctttcccttgattggtcaaatatcacctcgagtattatgttgtatccgtactgggtgcaagtagtacaattcgctgcgtttgttcttggggcatggatattgatcccagctgccaaatggggggatctttcaagttatccttacgggttaatgtcaaacagtttgtttttaggtaacggtaccaagtacccaactaccgagttgctcacgccaaatttaagattgaacgaaacccgatacgaagaacttgggccagtgcatcttggtgcccaacgtgcttggaatatgtttttcgattatgctgcctatgttagtggattcatgtgggttgttgcttttggttataaaagcttgtcagggtcgctcaaaagattggtgaagtcaagaaaacaaaaggggtccataaatttgcaatacactgataggttgaataaacttcaagcagcctatgaagaagttccattgtattggtacgctattcttttcttatgtgcatttgtcactcttttagtgatatttgcaacgaactcgttattcatgccgtggtggtgtcttcttgttggagttgcctttggtgctgtgattgttactcctttagtttggttgtatgctctatccaacttccagttgcccattggtaccttcaatgaattattatatggttatatgattcagaacaaaacgtcaagacatccagctggagctatggtgtatggtgcagttggtggggatttgttttacagagcccagtatattcttaatgatcaaaagattgcccattacatgcacatttctcaaagagcagtatttttctcgcagatatttggagaattaattggtgtacccatcaactatgccgccttaaggtgggtgatcctgtccaaaagagatttcttggatggcacaaaagtcgacaagcttcaccaatggactggccagaccattgtcagttacaacactaatgctgtgcagtatgtgattttgggaccagatagattattcaaaaactatccagtattgccatatggattcttgcttggtgctggtgctccactagtattatatcttcttcaccgattgtttcccaaatcgaaattgaagttccatttgtggaacaccactgtattcttttctactatgagtaccttctatggtaacctttcaacgggatatttttccagattcattggagggaccataacaatgttttgggcattcagatacaagcacagtttatggaaaaagtataattatttgttggcagctgctttggacactggccttaatttgagtatcttacttattttcttgttcttctcggctggtaaaacagtcaatttccccgaatggtggggcaacaatggcaagagtgtggagagatgttttgccatgagttga

SEQ ID NO: 85 - DNA, 2157 bp, Candida albicans
atgacaatagagacgatatcaaataatgaaggaatacggcagagatcagccagtgaaagcactcacacacatacttatctagatcaattagacatcccgcaaataacgttgaggtctactatagtcggattactaataggttcattggtccttatatcgaattttcaatttggtttacaaaccggatgggtttcaatgatgtcgttaccagctgccttattagcattttctattttcaagttattaccaatatccattgctaagaatttcaccgatgttgaaaatgtatttgtccagagtatagctgttgcagtaggaacaggacccctatgttatggattcattggcataatccctgcaatggaaaagtttatgactagtgaagaaagtggtttgggtcgacctttgacttttgggttgggccagttaatgatttggtcattgggtctcggattattcggggtattttttgccataccgttgcggaaacaagttattgtaaaggaaaaattacctttcccatctggcagtgcaaccgcaactttaatttcagtgttgcatggaagtgacatttatcaagataaagaggagatcagtgaaaagttggatatcgaagaagaagaagggagagaaacaggtagtattgcaactgaactggagagtttaacccaacaatcgtcaaaatcccaactcataactactaccaatattcaagatgattatgattcaaatatgagatcattaataatcacatttataatatcagccacatacaccatactttcattcttcctccctattttgaaaaagattcctatttttggcaatcatttatcggtcaattatttatggaacttccaaccatctccggcatatataggtcaaggtatcattatggggttgccaacagtttcctatatgttgtttggtgctatcttgggttggggtatattagctccattggcaaagcatatggagtgggcacctggaagaattgacgattggataaatgggggacaaggttggatcttatggattagcttaacggtaatgataagtgactccttggtgtcgtttgttgtggtgagcatcaaatcaattaataatgcattagataatttcagacaaagaagagatctagatcaatttctagaattgcaacaaagtcaacaaagtgaatacttattacaagatcaagaggaaactcgatcactgacttcatccaacgaaaatcctgaaaatagtacttacgatgggaagagaactcaagaggattgcaaatatacaatggaagtaccagaaagacatttagtttcaactaaaacaacggtgatcggaattgctgtatccacattgctttgcattatttctttgaaactagtgtttgggaacatagttcctatatatgcatcattagcagcaattatattggcaatgtttttctccatattgggagtcagagcattaggtgagactgatttaaacccagtgagtggaattggaaaattatcacaattgatttttgcattaataataccaagcaaccatccagccaagattttgattaatttggtcgctggtggagtagctgaagcaggggctcaacaagcaggtgatcttatgcaagatttgaaaaccggacatttaattggagcatcgccaaaagcccaatttattgctcagatattggggactctttattctgttggattaagctcaatcatgtataaagtgtacaacagtgtgtacaagataccaagcgatatgtttagaattccaactgcagtggtttggattgattgttcaaggctagtgactggtcaaggattacctcctcatattcgtgaatttgcgttggttttaggagtcatttttggtattatatcgttattaaagaatactgtgccgcccacttcactgtatcataaatatttggtttacttgccaagtggagtagccgttggtgtaggtatttacaacaccccaaatttcactttggccaggtttattggtgggttgatttgttacaattggcagaatataggtcctaatggtaagattggtatgattatattcagtagtggattggtgttgggcgagggactttttagtggattcactatgcttttaactagtttgggtgttaagcattggtaa

SEQ ID NO: 86 - protein, 633 aa, Saccharomyces cerevisiae
MSSSKSLYELKDLKNSSTEIHATGQDNEIEYFETGSNDRPSSQPHLGYEQHNTSAVRRFFDSFKRADQGPQDEVEATQMNDLTSAISPSSRQAQELEKNESSDNIGANTGHKSDSLKKTIQPRHVLMIALGTGIGTGLLVGNGTALVHAGPAGLLIGYAIMGSILYCIIQACGEMALVYSNLTGGYNAYPSFLVDDGFGFAVAWVYCLQWLCVCPLELVTASMTIKYWTTSVNPDVFVIIFYVLVITINIFGARGYAEAEFFFNCCKILMMTGFFILGIIIDVGGAGNDGFIGGKYWHDPGAFNGKHAIDRFKGVAATLVTAAFAFGGSEFIAITTAEQSNPRKAIPGAAKQMIYRILFLFLATIILLGFLVPYNSDQLLGSTGGGTKASPYVIAVASHGVRVVPHFINAVILLSVLSMANSSFYSSARLFLTLSEQGYAPKVFSYIDRAGRPLIAMGVSALFAVIAFCAASPKEEQVFTWLLAISGLSQLFTWTAICLSHLRFRRAMKVQGRSLGELGFKSQTGVWGSAYACIMMILILIAQFWVAIAPIGEGKLDAQAFFENYLAMPILIALYVGYKVWHKDWKLFIRADKIDLDSHRQIFDEELIKQEDEEYRERLRNGPYWKRVVAFWC

SEQ ID NO: 87 - protein, 609 aa, Saccharomyces cerevisiae
MLSSEDFGSSGKKETSPDSISIRSFSAGNNFQSSSSEKTYSKQKSGSDKLIHRFADSFKRAEGSTTRTKQINENTSDLEDGVESITSDSKLKKSMKSRHVVMMSLGTGIGTGLLVANAKGLHYGGPAALIIGYILVSFVTYFMIQAAGEMAVTYPTLPANFNAYSSIFISKSFGFATVWLYCFQWLTVLPLELITASMTIQFWNDKINPDIYILIFYVFLVFIHFFGVKAYGETEFIFNCCKILMIAGFIILSIVINCGGAGNDGYIGATYWHNPGAFAGDTSIGRFKNVCYILVTAYFSFGGMELFALSVQEQSNPRKSTPVAAKRSIYRIVVIYLLTMILIGFNVPYNDDQLMGAGGSATHASPYVLAASIHGVKIVPHIINAVILISVVSVANSSLYAGPRLICSLAQQGYAPKFLDYVDREGRPLRALIVCCVFGVIAFVAASSKEEIVFTWLAAIAGLSELFTWTSIMLSHLRFRQAMKVQGRSLDELGYKATTGIWGSIYGVFFNILVFVAQFWVALAPLGNGGKCDAESFFQNYLAFPIWLAFYFGYMVYNRDFTLLNPLDKIDLDFHRRIYDPELMRQEDEENKEKLRNMSLMRKAYHFWC

SEQ ID NO: 88 - protein, 604 aa, Saccharomyces cerevisiae
MSDPIVTSSKMEKSAEFEVTDSALYNNFNTSTTASLTPEIKEHSEESRNGLVHRFVDSFRRAESQRLEEDNDLEDGTKSMKSNNHLKKSMKSRHVVMMSLGTGIGTGLLVANAKGLSLAGPGSLVIGYVMVSFVTYFMVQAAGEMGVTYPTLPGNFNAYNSIFISKSFGFATTWLFCIQWLTVLPLELITSSMTVKYWNDTINADVFIVIFYVFLLFIHFFGVKAYGETEFIFNSCKILMVAGFIILSVVINCGGAGVDGYIGGKYWRDPGSFAEGSGATRFKGICYILVSAYFSFGGIELFVLSINEQSNPRKSTPVAAKRSVYRILIIYLLTMILIGFNVPHNNDQLMGSGGSATHASPYVLAASIHKVRVIPHIINAVILISVISVANSALYAAPRLMCSLAQQGYAPKFLNYIDREGRPLRALVVCSLVGVVGFVACSPQEEQAFTWLAAIAGLSELFTWSGIMLSHIRFRKAMKVQGRSLDEVGYKANTGIWGSYYGVFFNMLVFMAQFWVALSPIGNGGKCDAQAFFESYLAAPLWIFMYVGYMVYKRDFTFLNPLDKIDLDFHRRVYDPEIMRQEDEENKERLKNSSIFVRVYKFWC

SEQ ID NO: 89 - protein, 663 aa, Saccharomyces cerevisiae
MTLGNRRHGRNNEGSSNMNMNRNDLDDVSHYEMKEIQPKEKQIGSIEPENEVEYFEKTVEKTIENMEYEGEHHASYLRRFIDSFRRAEGSHANSPDSSNSNGTTPISTKDSSSQLDNELNRKSSYITVDGIKQSPQEQEQKQENLKKSIKPRHTVMMSLGTGIGTGLLVGNSKVLNNAGPGGLIIGYAIMGSCVYCIIQACGELAVIYSDLIGGFNTYPLFLVDPALGFSVAWLFCLQWLCVCPLELVTASMTIKYWTTSVNPDVFVVIFYVLIVVINVFGAKGYAEADFFFNCCKILMIVGFFILAIIIDCGGAGTDGYIGSKYWRDPGAFRGDTPIQRFKGVVATFVTAAFAFGMSEQLAMTASEQSNPRKAIPSAAKKMIYRILFVFLASLTLVGFLVPYTSDQLLGAAGSATKASPYVIAVSSHGVRVVPHFINAVILLSVLSVANGAFYTSSRILMSLAKQGNAPKCFDYIDREGRPAAAMLVSALFGVIAFCASSKKEEDVFTWLLAISGLSQLFTWITICLSHIRFRRAMKVQGRSLGEVGYKSQVGVWGSAYAVLMMVLALIAQFWVAIAPIGGGGKLSAQSFFENYLAMPIWIALYIFYKVWKKDWSLFIPADKVDLVSHRNIFDEELLKQEDEEYKERLRNGPYWKRVLDFWC

SEQ ID NO: 90 - protein, 619 aa, Saccharomyces cerevisiae
MDDSVSFIAKEASPAQYSHSLHERTHSEKQKRDFTITEKQDEVSGQTAEPRRTDSKSILQRKCKEFFDSFKRQLPPDRNSELESQEKNNLTKSIKSRHLVMISLGTGIGTGLLVGNGQVLGTAGPAGLVLGYGIASIMLYCIIQAAGELGLCYAGLTGNYTRYPSILVDPSLGFAVSVVYTIQWLTVLPLQLVTAAMTVKYWTSVNADIFVAVVFVFVIIINLFGSRGYAEAEFIFNSCKILMVIGFVILAIIINCGGAGDRRYIGAEYWHNPGPFAHGFKGVCTVFCYAAFSYGGIEVLLLSAAEQENPTKSIPNACKKVVYRILLIYMLTTILVCFLVPYNSDELLGSSDSSGSHASPFVIAVASHGVKVVPHFINAVILISVISVANSSLYSGPRLLLSLAEQGVLPKCLAYVDRNGRPLLCFFVSLVFGCIGFVATSDAEEQVFTWLLAISSLSQLFIWMSMSLSHIRFRDAMAKQGRSMNEVGYKAQTGYWGSWLAVLIAIFFLVCQFWVAIAPVNEHGKLNVKVFFQNYLAMPIVLFAYFGHKIYFKSWSFWIPAEKIDLDSHRNIFVSPSLTEIDKVDDNDDLKEYENSESSENPNSSRSRKFFKRMTNFWC

SEQ ID NO: 91 - protein, 592 aa, Saccharomyces cerevisiae
MTEDFISSVKRSNEELKERKSNFGFVEYKSKQLTSSSSHNSNSSHHDDDNQHGKRNIFQRCVDSFKSPLDGSFDTSNLKRTLKPRHLIMIAIGGSIGTGLFVGSGKAIAEGGPLGVVIGWAIAGSQIIGTIHGLGEITVRFPVVGAFANYGTRFLDPSISFVVSTIYVLQWFFVLPLEIIAAAMTVQYWNSSIDPVIWVAIFYAVIVSINLFGVRGFGEAEFAFSTIKAITVCGFIILCVVLICGGGPDHEFIGAKYWHDPGCLANGFPGVLSVLVVASYSLGGIEMTCLASGETDPKGLPSAIKQVFWRILFFFLISLTLVGFLVPYTNQNLLGGSSVDNSPFVIAIKLHHIKALPSIVNAVILISVLSVGNSCIFASSRTLCSMAHQGLIPWWFGYIDRAGRPLVGIMANSLFGLLAFLVKSGSMSEVFNWLMAIAGLATCIVWLSINLSHIRFRLAMKAQGKSLDELEFVSAVGIWGSAYSALINCLILIAQFYCSLWPIGGWTSGKERAKIFFQNYLCALIMLFIFIVHKIYYKCQTGKWWGVKALKDIDLETDRKDIDIEIVKQEIAEKKMYLDSRPWYVRQFHFWC

SEQ ID NO: 92 - protein, 602 aa, Saccharomyces cerevisiae
MSNTSSYEKNNPDNLKHNGITIDSEFLTQEPITIPSNGSAVSIDETGSGSKWQDFKDSFKRVKPIEVDPNLSEAEKVAIITAQTPLKHHLKNRHLQMIAIGGAIGTGLLVGSGTALRTGGPASLLIGWGSTGTMIYAMVMALGELAVIFPISGGFTTYATRFIDESFGYANNFNYMLQWLVVLPLEIVSASITVNFWGTDPKYRDGFVALFWLAIVIINMFGVKGYGEAEFVFSFIKVITVVGFIILGIILNCGGGPTGGYIGGKYWHDPGAFAGDTPGAKFKGVCSVFVTAAFSFAGSELVGLAASESVEPRKSVPKAAKQVFWRITLFYILSLLMIGLLVPYNDKSLIGASSVDAAASPFVIAIKTHGIKGLPSVVNVVILIAVLSVGNSAIYACSRTMVALAEQRFLPEIFSYVDRKGRPLVGIAVTSAFGLIAFVAASKKEGEVFNWLLALSGLSSLFTWGGICICHIRFRKALAAQGRGLDELSFKSPTGVWGSYWGLFMVIIMFIAQFYVAVFPVGDSPSAEGFFEAYLSFPLVMVMYIGHKIYKRNWKLFIPAEKMDIDTGRREVDLDLLKQEIAEEKAIMATKPRWYRIWNFWC

SEQ ID NO: 93 - protein, 603 aa, Saccharomyces cerevisiae
MPRNPLKKEYWADVVDGFKPATSPAFENEKESTTFVTELTSKTDSAFPLSSKDSPGINQTTNDITSSDRFRRNEDTEQEDINNTNLSKDLSVRHLLTLAVGGAIGTGLYVNTGAALSTGGPASLVIDWVIISTCLFTVINSLGELSAAFPVVGGFNVYSMRFIEPSFAFAVNLNYLAQWLVLLPLELVAASITIKYWNDKINSDAWVAIFYATIALANMLDVKSFGETEFVLSMIKILSIIGFTILGIVLSCGGGPHGGYIGGKYWHDPGAFVGHSSGTQFKGLCSVFVTAAFSYSGIEMTAVSAAESKNPRETIPKAAKRTFWLITASYVTILTLIGCLVPSNDPRLLNGSSSVDAASSPLVIAIENGGIKGLPSLMNAIILIAVVSVANSAVYACSRCMVAMAHIGNLPKFLNRVDKRGRPMNAILLTLFFGLLSFVAASDKQAEVFTWLSALSGLSTIFCWMAINLSHIRFRQAMKVQERSLDELPFISQTGVKGSWYGFIVLFLVLIASFWTSLFPLGGSGASAESFFEGYLSFPILIVCYVGHKLYTRNWTLMVKLEDMDLDTGRKQVDLTLRREEMRIERETLAKRSFVTRFLHFWC

SEQ ID NO: 94 - protein, 583 aa, Saccharomyces cerevisiae
MDEFESTKLSKVQFSTSVLSTPSNEGNNLIHRFKNSFKRNDSPAIQEGLLYSELSEEEKIQWDLANQPYKKVLDQRHLTMIAIGGTLGTGLFIGLGESLASGPASLLIGFLLVGASMLCVVQCGAELSCQYPVSGSYALHASRFIDPSVGFSIGINYLLMWLISYPSELVGCSLTISYWAPSVNPAAWVAIAFVLSMLLNLFGARGFAESEFYMSIFKIVALFIFIIIGIVLIAGGGPDSTGYIGTKYWHDPGSFAVPVFKNLCNTFVSAAYSFSGTEMVVLTSTEARSVSSVSRAAKGTFWRIIIFYIVTVIIIGCLVPYNDPRLISGSSSEDITASPFVIALSNTGAMGTRVSHFMNAVILIAVFSVCNSCVYASSRLIQGLATAGQLPKICAYMDRNGRPLVGMAICGAFGLLGFLVVSKNQGTVFTWLFALCSISFFTTWFCICFCQVRFRMAMKAQGRSKDDIIYRSTLGIYGGIFGCILNVLLVIGEIYVSAAPVGSPSSAANFFEYCMSIPIMIAVYIGHRIYRRDWRHWYIKRMDIDLDSGHSLEDFEATKLERDEDKKYVSSKPLYYRIYRFFC

SEQ ID NO: 95 - protein, 587 aa, Saccharomyces cerevisiae
MDILKRGNESDKFTKIETESTTIPNDSDRSGSLIRRMKDSFKQSNLHVIPEDLENSEQTEQEKIQWKLASQPYQKVLSQRHLTMIAIGGTLGTGLFIGLGYSLASGPAALLIGFLLVGTSMFCVVQSAAELSCQFPVSGSYATHVSRFIDESVGFTVATNYALAWLISFPSELIGCALTISYWNQTVNPAVWVAIFYVFIMVLNLFGVRGFAETEFALSIIKVIAIFIFIIIGIVLIAGGGPNSTGYIGAKYWHDPGAFAKPVFKNLCNTFVSAAFSFGGSELVLLTSTESKNISAISRAAKGTFWRIAIFYITTVVIIGCLVPYNDPRLLSGSNSEDVSASPFVIALSNTGSMGAKVSNFMNVVILVAVVSVCNSCVYASSRLIQALGASGQLPSVCSYMDRKGRPLVGIGISGAFGLLGFLVASKKEDEVFTWLFALCSISSFFTWFCICMSQIRFRMALKAQGRSNDEIAYKSILGVYGGILGCVLNALLIAGEIYVSAAPVGSPSSAEAFFEYCLSIPIMIVVYFAHRFYRRDWKHFYIKRSEIDLDTGCSVENLELFKAQKEAEEQLIASKPFYYKIYRFWC

SEQ ID NO: 96 - protein, 590 aa, Saccharomyces cerevisiae
MTNSKEDADIEEKHMYNEPVTTLFHDVEASQTHHRRGSIPLKDEKSKELYPLRSFPTRVNGEDTFSMEDGIGDEDEGEVQNAEVKRELKQRHIGMIALGGTIGTGLFIGLSTPLTNAGPVGALISYLFMGSLAYSVTQSLGEMATFIPVTSSFTVFSQRFLSPAFGAANGYMYWFSWAITFALELSVVGQVIQFWTYKVPLAAWISIFWVIITIMNLFPVKYYGEFEFWVASIKVLAIIGFLIYCFCMVCGAGVTGPVGFRYWRNPGAWGPGIISKDKNEGRFLGWVSSLINAAFTFQGTELVGITAGEAANPRKSVPRAIKKVVFRILTFYIGSLLFIGLLVPYNDPKLTQSTSYVSTSPFIIAIENSGTKVLPHIFNAVILTTIISAANSNIYVGSRILFGLSKNKLAPKFLSRTTKGGVPYIAVFVTAAFGALAYMETSTGGDKVFEWLLNITGVAGFFAWLFISISHIRFMQALKYRGISRDELPFKAKLMPGLAYYAATFMTIIIIIQGFTAFAPKFNGVSFAAAYISIFLFLAVWILFQCIFRCRFIWKIGDVDIDSDRRDIEAIVWEDHEPKTFWDKFWNVVA

SEQ ID NO: 97 - protein, 573 aa, Saccharomyces cerevisiae
MDETVNIQMSKEGQYEINSSSIIKEEEFVDEQYSGENVTKAITTERKVEDDAAKETESSPQERREVKRKLKQRHIGMIALGGTIGTGLIIGIGPPLAHAGPVGALISYLFMGTVIYSVTQSLGEMVTFIPVTSSFSVFAQRFLSPALGATNGYMYWLSWCFTFALELSVLGKVIQYWTEAVPLAAWIVIFWCLLTSMNMFPVKYYGEFEFCIASIKVIALLGFIIFSFCVVCGAGQSDGPIGFRYWRNPGAWGPGIISSDKNEGRFLGWVSSLINAAFTYQGTELVGITAGEAANPRKALPRAIKKVVVRILVFYILSLFFIGLLVPYNDPKLDSDGIFVSSSPFMISIENSGTKVLPDIFNAVVLITILSAGNSNVYIGSRVLYSLSKNSLAPRFLSNVTRGGVPYFSVLSTSVFGFLAFLEVSAGSGKAFNWLLNITGVAGFFAWLLISFSHIRFMQAIRKRGISRDDLPYKAQMMPFLAYYASFFIALIVLIQGFTAFAPTFQPIDFVAAYISIFLFLAIWLSFQVWFKCRLLWKLQDIDIDSDRRQIEELVWIEPECKTRWQRVWDVLS

SEQ ID NO: 98 - protein, 611 aa, Saccharomyces cerevisiae
MGRFSNIITSNKWDEKQNNIGEQSMQELPEDQIEHEMEAIDPSNKTTPYSIDEKQYNTKKKHGSLQGGAIADVNSITNSLTRLQVVSHETDINEDEEEAHYEDKHVKRALKQRHIGMIALGGTIGTGLFVGISTPLSNAGPVGSLIAYIFMGTIVYFVTQSLGEMATFIPVTSSITVFSKRFLSPAFGVSNGYMYWFNWAITYAVEVSVIGQVIEYWTDKVPLAAWIAIFWVIITLMNFFPVKVYGEFEFWVASVKVLAIMGYLIYALIIVCGGSHQGPIGFRYWRNPGAWGPGIISSDKSEGRFLGWVSSLINAAFTYQGTELVGITAGEAANPRKTVPRAINKVVFRIVLFYIMSLFFIGLLVPYNDSRLSASSAVIASSPFVISIQNAGTYALPDIFNAVVLITVVSAANSNVYVGSRVLYSLARTGNAPKQFGYVTRQGVPYLGVVCTAALGLLAFLVVNNNANTAFNWLINISTLAGLCAWLFISLAHIRFMQALKHRGISRDDLPFKAKLMPYGAYYAAFFVTVIIFIQGFQAFCPFKVSEFFTSYISLILLAVVFIGCQIYYKCRFIWKLEDIDIDSDRREIEAIIWEDDEPKNLWEKFWAAVA

SEQ ID NO: 99 - protein, 627 aa, Saccharomyces cerevisiae
MVNILPFHKNNRHSAGVVTCADDVSGDGSGGDTKKEEDVVQVTESPSSGSRNNHRSDNEKDDAIRMEKISKNQSASSNGTIREDLIMDVDLEKSPSVDGDSEPHKLKQGLQSRHVQLIALGGAIGTGLLVGTSSTLHTCGPAGLFISYIIISAVIYPIMCALGEMVCFLPGDGSDSAGSTANLVTRYVDPSLGFATGWNYFYCYVILVAAECTAASGVVEYWTTAVPKGVWITIFLCVVVILNFSAVKVYGESEFWFASIKILCIVGLIILSFILFWGGGPNHDRLGFRYWQHPGAFAHHLTGGSLGNFTDIYTGIIKGAFAFILGPELVCMTSAECADQRRNIAKASRRFVWRLIFFYVLGTLAISVIVPYNDPTLVNALAQGKPGAGSSPFVIGIQNAGIKVLPHIINGCILTSAWSAANAFMFASTRSLLTMAQTGQAPKCLGRINKWGVPYVAVGVSFLCSCLAYLNVSSSTADVFNWFSNISTISGFLGWMCGCIAYLRFRKAIFYNGLYDRLPFKTWGQPYTVWFSLIVIGIITITNGYAIFIPKYWRVADFIAAYITLPIFLVLWFGHKLYTRTWRQWWLPVSEIDVTTGLVEIEEKSREIEEMRLPPTGFKDKFLDALL

SEQ ID NO: 100 - protein, 608 aa, Saccharomyces cerevisiae
MKMPLKKMFTSTSPRNSSSLDSDHDAYYSKQNPDNFPVKEQEIYNIDLEENNVSSRSSTSTSPSARDDSFAVPDGKDENTRLRKDLKARHISMIAIGGSLGTGLLIGTGTALLTGGPVAMLIAYAFVGLLVFYTMACLGEMASYIPLDGFTSYASRYVDPALGFAIGYTYLFKYFILPPNQLTAAALVIQYWISRDRVNPGVWITIFLVVIVAINVVGVKFFGEFEFWLSSFKVMVMLGLILLLFIIMLGGGPNHDRLGFRYWRDPGAFKEYSTAITGGKGKFVSFVAVFVYSLFSYTGIELTGIVCSEAENPRKSVPKAIKLTVYRIIVFYLCTVFLLGMCVAYNDPRLLSTKGKSMSAAASPFVVAIQNSGIEVLPHIFNACVLVFVFSACNSDLYVSSRNLYALAIDGKAPKIFAKTSRWGVPYNALILSVLFCGLAYMNVSSGSAKIFNYFVNVVSMFGILSWITILIVYIYFDKACRAQGIDKSKFAYVAPGQRYGAYFALFFCILIALIKNFTVFLGHKFDYKTFITGYIGLPVYIISWAGYKLIYKTKVIKSTDVDLYTFKEIYDREEEEGRMKDQEKEERLKSNGKNMEWFYEKFLGNIF

SEQ ID NO: 101 - protein, 852 aa, Saccharomyces cerevisiae
MSSVNQIYDLFPNKHNIQFTDSHSQEHDTSSSLAKNDTDGTISIPGSIDTGILKSIIEEQGWNDAELYRSSIQNQRFFLTDKYTKKKHLTMEDMLSPEEEQIYQEPIQDFQTYNKRVQREYELRERMEEFFRQNTKNDLHILNEDSLNQQYSPLGPADYVLPLDRYSRMKHIASNFFRKKLGIPRKLKRRSHYNPNAEGHTKGNSSILSSTTDVIDNASYRNIAIDENVDITHKEHAIDEINEQGASGSESVVEGGSLLHDIEKVFNRSRATRKYHIQRKLKVRHIQMLSIGACFSVGLFLTSGKAFSIAGPFGTLLGFGLTGSIILATMLSFTELSTLIPVSSGFSGLASRFVEDAFGFALGWTYWISCMLALPAQVSSSTFYLSYYNNVNISKGVTAGFITLFSAFSIVVNLLDVSIMGEIVYVAGISKVIIAILMVFTMIILNAGHGNDIHEGVGFRYWDSSKSVRNLTYGLYRPTFDLADAGEGSKKGISGPKGRFLATASVMLISTFAFSGVEMTFLASGEAINPRKTIPSATKRTFSIVLISYVFLIFSVGINIYSGDPRLLSYFPGISEKRYEAIIKGTGMDWRLRTNCRGGIDYRQISVGTGYSSPWVVALQNFGLCTFASAFNAILIFFTATAGISSLFSCSRTLYAMSVQRKAPPVFEICSKRGVPYVSVIFSSLFSVIAYIAVDQTAIENFDVLANVSSASTSIIWMGLNLSFLRFYYALKQRKDIISRNDSSYPYKSPFQPYLAIYGLVGCSLFVIFMGYPNFIHHFWSTKAFFSAYGGLMFFFISYTAYKVLGTSKIQRLDQLDMDSGRREMDRTDWTEHSQYLGTYRERAKKLVTWLI

SEQ ID NO: 102 - protein, 596 aa, Saccharomyces cerevisiae
MTKERMTIDYENDGDFEYDKNKYKTITTRIKSIEPSEGWLEPSGSVGHINTIPEAGDVHVDEHEDRGSSIDDDSRTYLLYFTETRRKLENRHVQLIAISGVIGTALFVAIGKALYRGGPASLLLAFALWCVPILCITVSTAEMVCFFPVSSPFLRLATKCVDDSLAVMASWNFWFLECVQIPFEIVSVNTIIHYWRDDYSAGIPLAVQVVLYLLISICAVKYYGEMEFWLASFKIILALGLFTFTFITMLGGNPEHDRYGFRNYGESPFKKYFPDGNDVGKSSGYFQGFLACLIQASFTIAGGEYISMLAGEVKRPRKVLPKAFKQVFVRLTFLFLGSCLCVGIVCSPNDPDLTAAINEARPGAGSSPYVIAMNNLKIRILPDIVNIALITAAFSAGNAYTYCSSRTFYGMALDGYAPKIFTRCNRHGVPIYSVAISLVWALVSLLQLNSNSAVVLNWLINLITASQLINFVVLCIVYLFFRRAYHVQQDSLPKLPFRSWGQPYTAIIGLVSCSAMILIQGYTVFFPKLWNTQDFLFSYLMVFINIGIYVGYKFIWKRGKDHFKNPHEIDFSKELTEIENHEIESSFEKFQYYSKA

SEQ ID NO: 103 - protein, 558 aa, Saccharomyces cerevisiae
MAVLNLKRETVDIEETAKKDIKPYFASNVEAVDIDEDPDVSRYDPQTGVKRALKNRHISLLALGGVIGPGCLVGAGNALNKGGPLALLLGFSIIGIIAFSVMESIGEMITLYPSGGGFTTLARRFHSDALPAVCGYAYVVVFFAVLANEYNTLSSILQFWGPQVPLYGYILIFWFAFEIFQLVGVGLFGETEYWLAWLKIVGLVAYYIFSIVYISGDIRNRPAFGFHYWNSPGALSHGFKGIAIVFVFCSTFYSGTESVALAATESKNPGKAVPLAVRQTLWRILVVYIGIAVFYGATVPFDDPNLSASTKVLKSPIAIAISRAGWAGGAHLVNAFILITCISAINGSLYIGSRTLTHLAHEGLAPKILAWTDRRGVPIPAITVFNALGLISLMNVSVGAANAYSYIVNLSGVGVFIVWGVISYTHLRIRKAWVAQGRSIEELPYEALFYPWTPVLSLAANIFLALIQGWSYFVPFDAGNFVDAYILLPVGILLYIGICVFKSNHFRTVDLRSINLDEGRRKDMEADLSDQESSLASSETMKDYKSATFFRYLSNIFT

SEQ ID NO: 104 - protein, 574 aa, Saccharomyces cerevisiae
MSEGRTFLSQLNVFNKENYQFSSSTTKKEVSNSTVDADNGASDFEAGQQFATELDQGEKQLGILSCIGLICNRMLGTGVFAVSSTIYTLCGSVGLALIMWAVGAIIAISGLYVYMEFGTAIPKNGGEKNYLEAIFRKPKFFITCMYAAYIFFLGWAAGNSINTAIMFLTAADTEVTKWNQRGIGVAVVFFAFLINSLNVKIGLYLQNILGIFKIGIVLFISITGWVALGGGLKDGYQSHNFRNAFEGTETATAYGIVNALYSVIWSFVGYSNVNYALGEVKNPVRTLKIAGPTSMVFLAIIYIFVNIAYFAVVPKDKLISSKLILAADFFDIVFGGQAKRAAAALVGLSALGNVLSVIFSQGRIIQQLGREGVLPFSNFFASSKPFNSPMVGLFQHFIVCTVTILAPPPGDAYLLVQNLISYPMNIINFAISAGLLWIYWQRRQGKIEWNPPIKAGVFVTGFFTLSNLYLIIAPYVPPSNGESVYSSMPYWIHCVIAWGIFFFGGVYYVVWAQLLPRWGHYKLVSKDVLGEDGFWRVKIAKVYDDTIGDVDTQEDGVIETNIIEHYKSEQEKSL

SEQ ID NO: 105 - protein, 546 aa, Saccharomyces cerevisiae
MEPLLFNSGKANPSQDVFIDVEVGDITTKYGSTNTGSFSSMDTVEAQAIKAETARFMEVPQGRHLGVFSTVVLFVSRIMGSGIFAVPSVILLNTGGNKLIYFAIWVFSAAIAFAGLYLFLEFGSWIPKSGGRKNFLERSFERPRLLISVVFSCYSVLTGYALTGSIVFGKYVLSAFGVTDDSWSKYVSISFIIFAVLIHGVSVRHGVFIQNALGGLKLIMIVLMCFAGLYTLFFYKSTGQVAWDLPVTQVEKDSLLSVSSIATAFISSFFCFSGWDTVHTVTSEIKNPVKTLKVSGPLSLIICFVCYTMMNVAYLKVLTYEEIVSAGPLVGSVLFTKLFGPRVGGKFIAFSIAISAASNILVVIYSISRVNQEIFKEGYLPFSIHMSKNWPFDAPLPSISLCGFITIAWILILPKEGESFNYLVSMDGYGNQFFLLLVAIGLFIWRFKHKNEVPEIRASTFGVLAIITLSLYMLMAPFFADPSLNRVGFLPPYQIMSLLVIVACFFFWLVKFVLLPKFFHYKLLPKITYLHDGLIVTEWVKKPCLC

SEQ ID NO: 106 - protein, 571 aa, Saccharomyces cerevisiae
MSMSSKNENKISVEQRISTDIGQAYQLQGLGSNLRSIRSKTGAGEVNYIDAAKSVNDNQLLAEIGYKQELKRQFSTLQVFGIAFSIMGLLPSIASVMGGGLGGGPATLVWGWFVAAFFILLVGITMAEHASSIPTAGGLYYWTYYYAPEGYKEIISFIIGCSNSLALAAGVCSIDYGLAEEIAAAVTLTKDGNFEVTSGKLYGIFAGAVVVMCICTCVASGAIARLQTLSIFANLFIIVLLFIALPIGTKHRMGGFNDGDFIFGKYENLSDWNNGWQFCLAGFMPAVWTIGSFDSCVHQSEEAKDAKKSVPIGIISSIAVCWILGWLIIICLMACINPDIDSVLDSKYGFALAQIIYDSLGKKWAIAFMSLIAFCQFLMGASITTAVSRQVWAFSRDNGLPLSKYIKRVDSKYSVPFFAILAACVGSLILGLLCLIDDAATDALFSLAVAGNNLAWSTPTVFRLTSGRDLFRPGPFYLGKIWSPIVAWTGVAFQLFIIILVMFPSQQHGITKSTMNYACVIGPGIWILAGIYYKVYKKKYYHGPATNLSDDDYTEAVGADVIDTIMSKQEP

SEQ ID NO: 107 - protein, 618 aa, Saccharomyces cerevisiae
MPEYTLLADNIRENIVHFDPNGLFDNLHTIVHEDDSQENEEAEHFNYDQVLDKSLLSRGSIVGLGLGLMSPVLGMCTSMAIGLINGGPLTIMLGFLISGVCIWFSSLSLGEIVSKFPMELHVGSAMLAPEKLKLVCSWYTGWLMLIGNWTMSTSITFAGAQLTISLILMTNSNLISEAHLIFYTVIVFYLVVTVVGLVNLKFARFIETINKVCVYWIIYAIIFIDILLLVFHKGKFRSLKYALFHFDNNLSGYKSAFLSFIIGFQQSNFTLQGFSMLPALADEVKVPEKDIPRGMSNAVLLSAFSGVIFLIPIMLILPDNDLLFTNHKVLPIVNIFTKSTDSVVLSFFLVLLILGNLLFSGIGSITTSSRAVYSFSRDQAIPYYDKWTYVEPDSQSKVPKNSVVLSMIISYFLGLLALISTAAFNAFIGAAVLCLCSATFIPLVLVLFTRRRAIRSAPVKIRYKFGWFINIVSIVWLLLSMVSVCLPTQVPVTFKTMNYALMVYVFCILVITGLYFKWGKYNFRLPLADDIKAPIPSDAEETVFELEDSNVEHTLNSGTTVKESVENNSEEGFIKVHPKSSTENPFEENEENVITDYGDEHHTAEQEFDLADDRRYDI

SEQ ID NO: 108 - protein, 563 aa, Saccharomyces cerevisiae
MSIRNDNASGGYMQPDQSSNASMHKRDLRVEEEIKPLDDMDSKGAVAADGEVHLRKSFSLWSILGVGFGLTNSWFGISTSMVAGISSGGPMMIVYGIIIVALISICIGTSLGELSSAYPHAGGQFWWSLKLAPPKYKRFAAYMCGSFAYAGSVFTSASTTLSVATEVVGMYALTHPEFIPKRWHIFVCFELLHLFLMFFNCYGKSLPIISSSSLYISLLSFFTITITVLACSHGKFNDAKFVFATFNNETGWKNGGIAFIVGLINPAWSFSCLDCATHMAFEVEKPERVIPIAIMGTVAIGFVTSFCYVIAMFFSIQDLDAVLSSTTGAPILDIYNQALGNKSGAIFLGCLILFTSFGCVIACHTWQARLCWSFARDNGLPLSRLWSQVNPHTGVPLNAHLMSCAWITLIGLLYLASSTAFQSLITGCIAFLLLSYIIPVICLLAKKRNIAHGPFWLGKFGFFSNIVLLGWTVFSVVFFSFPPVLPVTKDNMNYVCVVIVGYTAYSILYWKYKGKKEFHALEESENEQAEYSNNFDTIEDSREFSVAASDVELENEHVPWGKK

SEQ ID NO: 109 - protein, 561 aa, Saccharomyces cerevisiae
MNRVGAVFLFVYERNFFLSIVPDRHRTEIRMSSSERSEVKFDKHFNWWSLLGIAFSLSCSWVGISASMAVGIASGGPLLIIYGLIIAAFFSLMCGISLGDFAAILPNSSGGSFWVLKMLEQESVTLKTPEYEDPSDDDEEVFLENYCQTFNVEVSSKFQKVSSMVVGLLNYFGAIFTTASICSSLSMSCIGIHKLLHPDYELKHWHVFVGYECINAVLTLFNIYSTPLPYISQFGLYTSLLSFAMTFIICIVSRSDNTVDPWPKASNIFGSFDNQTGWNSSGMAFVVGLVNPIWAFVGIDSATHMIDEVGYSKSRFLVPKVIITTIIVGFVTSFIYCVGLFFCITDQTAVVESILPIVEIFYQATGNRNLSVFLQCMCITTGFVSGIASGTWQSRILQSFGKSYAPFYKEGSLGNKSLKKLAVLTPGFKSPLYAHFLSQICVTIIGCIFMGSSTAFNAIITACITLLLMSYAVPSFIFLFVIKKEKFIHRIESDVNCVSRPNRRRMSMIPHIICILWTLFCLVFLSFPYTLPVTAGNMNYTSVVYAVVFCIISIVVFPTCI

SEQ ID NO: 110 - protein, 492 aa, Saccharomyces cerevisiae
MESRTTGPLTTETYDGPTVAFMILGAALVFFMVPGLGFLYSGLARRKSALALIWVVLMATLVGILQWYFWGYSLAFSKSAPNNKFIGNLDSFGFRNVYGKKFDEDAYPELAYATFQMMFSCVNLSIIAGATAERGRLLPHMVFLFILATIGYCPVTYWIWSPGGWAYQWGVLDWAGGGNIEILSAVSGFVYSWFLGKRNEKLLINFRPHNVSLVTLGTSILWFGWLLFNSASSLSPNLRSVYAFMNTCLSAITGGMTWCLLDYRSEKKWSTVGLCSGIISGLVAATPSSGCITLYGSLIQGIVAGVVCNFATKLKYYAKVDDAMDILAEHGVAGVIGLIFNALFGADWVIGMDGTTEHEGGWVTHNYKQMYKQIAYIAASIGYTAAVTAIICFVLGYIPGMRLRISEEAEEAGMDEDQIGEFAYDYVEVRRDYYLWGVDEDSQRSDVNHRVNNAHLAAERSSSGTNSSSDGNGEMIQSEKILPIHQEDPANR

SEQ ID NO: 111 - protein, 499 aa, Saccharomyces cerevisiae
MSYNFTGTPTGEGTGGNSLTTDLNTQFDLANMGWIGVASAGVWIMVPGIGLLYSGLSRKKHALSLLWASMMASAVCIFQWFFWGYSLAFSHNTRGNGFIGTLEFFGFRNVLGAPSSVSSLPDILFAVYQGMFAAVTGALMLGGACERARLFPMMVFLFLWMTIVYCPIACWVWNAEGWLVKLGSLDYAGGLCVHLTSGHGGLVYALILGKRNDPVTRKGMPKYKPHSVTSVVLGTVFLWFGWMFFNGGSAGNATIRAWYSIMSTNLAAACGGLTWMVIDYFRCGRKWTTVGLCSGIIAGLVGITPAAGFVPIWSAVVIGVVTGAGCNLAVDLKSLLRIDDGLDCYSIHGVGGCIGSVLTGIFAADYVNATAGSYISPIDGGWINHHYKQVGYQLAGICAALAWTVTVTSILLLTMNAIPFLKLRLSADEEELGTDAAQIGEFTYEESTAYIPEPIRSKTSAQMPPPHENIDDKIVGNTDAEKNSTPSDASSTKNTDHIV

SEQ ID NO: 112 - protein, 489 aa, Saccharomyces cerevisiae
MARGDGHLWTETYDSSTVAFMILGAALVFFMVPGLGFLYSGLARRKSALALIWVVIMATLVGILQWYFWGYSLAFSKTATNNKFIGNLDSFGFRNVYGKISDDSTYPELIYAIFQMMFMCVALSIIAGATAERGKLFPHMVFLFVFATLVYCPITYWIWAPGGWAYQWGVLDWAGGGNIEILSAVAGFVYSYFLGRRKENLLINFRPHNVSMVTLGTSILWFGWLLFNAASSLSPNMRSVYAFMNTCLSATTGGMTWCLLDYRSEKKWSTVGLCSGIICGLVAATPSSGCITLYGSLIQGIIAGVVCNFATKIKYYLKVDDSLDLLAEHGIAGVVGLIFNALFAADWVIGMDGTTKHKGGWLTHNWKQMYIQIAYIGASAGYCAVVTAIICFVLGKIPGVHLRVTEEAEALGLDEDQIGEFAYDYVEVRRDYYQWGVDTDALHTTCNGANSASETNPTEDSQNSSLSSATVSGQNEKSNNPKLHHAKEA

SEQ ID NO: 113 - protein, 543 aa, Saccharomyces cerevisiae
MSADASTNSNASLDEKNLNITSEAEIKNEDVTAEPVLSTVLSPNGKIVYISDKVDEAMKLAEEAKEIEVTPEEDRKLRWKIDYCMFPLMCILYAVQFMDKISTSSAAVMGLRTDLKMHGDQYSWVTSAFYFGYLFMNLGPVQFIFQRTSHMSKMLAVFIVIWGMLLALHAAPTVKYPSFIVLRVLLGCAESVVTPCFTIITAQYWKTEEQFTRVSIWFGMNGLGSILINAIAYGVYIHQDSYAIKGWRTLFVITGVITIFIGILIFLWIPDDPSKARFLSKREKLMVVQRIRSNQQGFGNHEIKKYQIIEALKDVRTWLYFLFTVSSNIPNGGISSFMSILLNSDFGYSSKETLLMGLPTGAVELVGCPLFGILAVYAANKKIPFWKYKLSWAIFAAVLALIASCMLGFATNSKKARLAGAYLWYISPVSFICVLSNISANSSGYSKKWTVSSINLVAYAAANLAGPQTFIAKQAPKYHGAKVAMVVCYAVMIVLLSILLIVNLRENKRRDKIAAERGFPEETENLEFSDLTDFENPNFRYTL

SEQ ID NO: 114 - protein, 531 aa, Saccharomyces cerevisiae
MSKVDVKIGADSISSSDEILVPSRLADVTLAFMEENDAAVPEITPEQEKKLKRKLFLTIFTFVSAINLLLYMDKATLSYDSILGFFEDTGLTQNTYNTVNTLFYVGFAIGQFPGQYLAQKLPLGKFLGGLLATWTILIFLSCTAYNFSGVVALRFFLGLTESVVIPILITTMGMFFDASERAAAQPFFFAACMGSPIPTGFIAYGVLHITNPSISLWKIFTIIIGGLTFIMTVVVILWFPNNPADVKFFSIQERVWIIRRVQASTGSSIEQKVFKKSQFREAMKDYITWLFGLFFLLQQLANNLPYQQNLLFEGMGGVDALGSTLVSVAGAGFAVVCAFIATLMLAKWKNISALTAIFWTLPALVGSIAAAALPWDNKIGILANICMAGQIFGIPFIIALSWASSSASGYTKKLTRSSVSLFAMGIANIISPQIWREKDSPRFLPAWIVQIVLSFSLAPAILLLIHFILKRRNNQRLKNYDENLQNYLDRIQLIESENPSSIEEGKVVTHENNLAVFDLTDLENETFIYPL

SEQ ID NO: 115 - protein, 534 aa, Saccharomyces cerevisiae
MSNKFTMESPKHLVDDVLFISPTNDGSEEKPTEVTFQEDEGHDASLHNRSHDKKSELATEREIMATTTDDDGIPSPSHPMEKRVLRKMDIYLIPLMGMLYFLSNLDKSNIGNAEVAGLSKDIHLVGTQYNTCVTVFFATYVLFDPIGTNLLKIMGPPLMMSICLTCFGAISLGTAWVKNYAQLIVVRLLLGAFEGMIYPAINMYLSVCYRREQYALRFAFVFSAACLSSSFGGLIAYGCSKISGSLKDWQYIYIVEGCISLGFVPFYAFGLSKNLEDSWFFNKEEKEYISERYKTMNTFDPDEKFEWFQVWQAVKDVKTWASAVALFGIDLTTFGLTVFLPIIITSMGFTNVRAQLMTVPIYFLTAIVFFICAVWSDRIKLRSPFILGACLTTSIGIAIVLGSQVHGVRYFGVYILCMGIYVNAACNCLWLSGNTGNYFKRATALGINLFFGSGSGLVSGQIFVAKDKPRYIKGLSISLAFQVFSIFMTVVQIFLYKRENDKKKAIIDRCNELGEPIPYDERLSDKNPEFKYMY

SEQ ID NO: 116 - protein, 593 aa, Saccharomyces cerevisiae
MTISNKSWRSYFPHLRKLPEDDQYLYSDDTNSSIIAEEELHHSVDKSSKTDVTAETTAVEPHPHNLRHDLPYEVRDEAGRKWWKYFDEFEYRVNKEYKKSRKWYEFLYPNHTTQTKAERRLLYKLDIIIALYFFMLCWSKSVDLNNYTNAYVSNMKEDLNMKGNDYVYTSTIANVGAIVFQLPFMYLLPRFPSHIILPVMDLGWTWFTFACYRANSLAELRAYRFILSAFGAAYYPVSQYILGCWYAPDEINSRVCLFFCGQQLGSVTSGLLQSRIFKSLNGVHGLAGWRWMFLIDAIAISLPTAIIGFFVIPGVPSKCYSLFLTDEEIRIARARNKRNQIKDGVDKSKLAPLWSRKLWKKVFCTPAFWVLVVFDTCSWNNMTAYSGSYTLWLKSNTKYSIAQVNNLSVIPACLGFAYVIFCAFGADLFRCKWIFMVFAAIMNTVSCALLIKWDIPSKAKWYAFFTTYFSVAASPCLWSFINDFLRFDPQVKAITWIAIYSFSQSTYAWIPTLAWPTVESPRFKTGYTVSLIFGAIYGLWTFVVLFFYKRNEKKHALGNGIILYDSNKGEELPEFVKKNMEERDGYYYLKRSS

SEQ ID NO: 117 - protein, 512 aa, Saccharomyces cerevisiae
MMKESKSITQHEVERESVSSKRAIKKRLLLFKIDLFVLSFVCLQYWINYVDRVGFTNAYISGMKEDLKMVGNDLTVSNTVFMIGYIVGMVPNNLMLLCVPPRIWLSFCTFAWGLLTLGMYKVTSFKHICAIRFFQALFESCTFSGTHFVLGSWYKEDELPIRSAIFTGSGLVGSMFSGFMQTSIFTHLNGRNGLAGWRWLFIIDFCITLPIAIYGFIFFPGLPDQTSAVSKFSMTRYIFNEQELHYARRRLPARDESTRLDWSTIPRVLKRWHWWMFSLVWVLGGENLGFASNSTFALWLQNQKYTLAQRNNYPSGIFAVGIVSTLCSAVYMSKIPRARHWHVSVFISLVMVIVAVLIRADPLNPKVVFSAQYLGGVAYAGQAVFFSWANIICHADLQERAIVLASMNMFSGAVNAWWSILFFASDMVPKFERGCYALLATAISSGIVSVVIRSLQIKENLSKKQVPYIDANDMPGEDDDDDNQDNENDGDDESMEVELHNEEMAEISNPFR

SEQ ID NO: 118 - protein, 593 aa, Saccharomyces cerevisiae
MYSIVKEIIVDPYKRLKWGFIPVKRQVEDLPDDLNSTEIVTISNSIQSHETAENFITTTSEKDQLHFETSSYSEHKDNVNVTRSYEYRDEADRPWWRFFDEQEYRINEKERSHNKWYSWFKQGTSFKEKKLLIKLDVLLAFYSCIAYWVKYLDTVNINNAYVSGMKEDLGFQGNDLVHTQVMYTVGNIIFQLPFLIYLNKLPLNYVLPSLDLCWSLLTVGAAYVNSVPHLKAIRFFIGAFEAPSYLAYQYLFGSFYKHDEMVRRSAFYYLGQYIGILSAGGIQSAVYSSLNGVNGLEGWRWNFIIDAIVSVVVGLIGFYSLPGDPYNCYSIFLTDDEIRLARKRLKENQTGKSDFETKVFDIKLWKTIFSDWKIYILTLWNIFCWNDSNVSSGAYLLWLKSLKRYSIPKLNQLSMITPGLGMVYLMLTGIIADKLHSRWFAIIFTQVFNIIGNSILAAWDVAEGAKWFAFMLQCFGWAMAPVLYSWQNDICRRDAQTRAITLVTMNIMAQSSTAWISVLVWKTEEAPRYLKGFTFTACSAFCLSIWTFVVLYFYKRDERNNAKKNGIVLYNSKHGVEKPTSKDVETLSVSDEK

SEQ ID NO: 119 - protein, 633 aa, Saccharomyces cerevisiae
MPDNLSLHLSGSSKRLNSRQLMESSNETFAPNNVDLEKEYKSSQSNITTEVYEASSFEEKVSSEKPQYSSFWKKIYYEYVVVDKSILGVSILDSFMYNQDLKPVEKERRVWSWYNYCYFWLAECFNINTWQIAATGLQLGLNWWQCWITIWIGYGFVGAFVVLASRVGSAYHLSFPISSRASFGIFFSLWPVINRVVMAIVWYSVQAYIAATPVSLMLKSIFGKDLQDKIPDHFGSPNATTYEFMCFFIFWAASLPFLLVPPHKIRHLFTVKAVLVPFASFGFLIWAIRRAHGRIALGSLTDVQPHGSAFSWAFLRSLMGCMANFSTMVINAPDFSRFSKNPNSALWSQLVCIPFLFSITCLIGILVTAAGYEIYGINYWSPLDVLEKFLQTTYNKGTRAGVFLISFVFAVAQLGTNISANSLSCGTDMSAIFPKFINIKRGSLFCAAMALCICPWNLMATSSKFTMALSAYAIFLSSIAGVVCSDYFVVRRGYIKLTHIYSHQKGSFYMYGNRFGINWRALAAYLCGVAPCLPGFIAEVGAPAIKVSDGAMKLYYLSYWVGYGLSFSSYTALCYFFPVPGCPVNNIIKDKGWFQRWANVDDFEEEWKDTIERDDLVDDNISVYEHEHEKTFI

SEQ ID NO: 120 - protein, 635 aa, Saccharomyces cerevisiae
MANDALSAIFSNPSRKGVQPSTSIVSYTNNEDDIIDVENGKFNKNKNINTNVYVDNSSIEESEVVPLPETKSIWSKIYYDFIVLDKTTLNVSLKESFLYNRDLKPVEEERRCWSWFNYLYFWLADCFNINTWQIAGTGLQLGLNWWQCWLTVWIGYTFAGIFVVLNSRFGSAYHLSFPITVRASFGIFFSMWPIINRVVMAIVWYAVQAWLGATPVALMLKSIFGKNLEDRIPNHFGSPNSTTFEFMCFFIFWVVSIPFVLVAPHKIRHLFTVKAALIPFAAFGFLIWALKKSHGKIELGTLNDYSPHGSEFSWIFVRSLMACVANFAALIINAPDFGRFAKNPQASLWPQLVAIPLFFAITCLIGIIVTAAGYHLYGVNYWSPLDVLGQFLETTYTRGTRAGVFLISFVFALAQLGTNISANSLACGADMTALFPRYINIRRGSLFCVAMALCICPWNLMASSSKFTSALGAYAIFLSSIAGVICADYFVVRRGYVKLTHLFLAQKGSFYMFGNKFGANWRAFVAYICGIAPNLPGFIGDVGAPKITVSEGAMRLYYLGYPVGFFISAVIYLILCYFFPVPGTPVTNFLTEKGWFQRWAYVEDFEQDWKNELRRDDLCDDTVSIYDGTEEKIVY

SEQ ID NO: 121 - protein, 639 aa, Saccharomyces cerevisiae
MPVSDSGFDNSSKTMKDDTIPTEDYEEITKESEMGDATKITSKIDANVIEKKDTDSENNITIAQDDEKVSWLQRVVEFFEVKNDSTDLADHKPENPIRTFKDLQESLRSTYLYNTDLRPVEAKRRTWTWKQYIFFWISGSFNVNTWQISATGLQLGLNWWQTWICIWVGYTFVAFFLILGSKVGNNYHISFPISSRVSFGIYFSIWIVINRVVMACVWNSTLAYIGSQCVQLMLKAIFGTNLNTRIKDTIKNPNLTNFEFMCFMVFWVACLPFLWFPPDKLRHIFALKSAITPFAAFGFLIWTLCKAKGHLALGSLNDNGGAISKTVLAWSVIRAIMSALDNFSTLILNAPDFTRFGKTYKSSVYSQLIALPVCYAIISLIGILSVSAAYTLYGVNYWSPLDILNRYLDNYTSGNRAGVFLISFIFAFDQLGANLSGNSIPAGTDLTALLPKFINIRRGSYICALISLAICPWDLLSSSSKFTTALAAYAVFLSAIAGVISADYFIVRKGYVNIFHCYTDKPGSYYMYNKYGTNWRAVVAYIFGIAPNFAGFLGSVGVSVPIGAMKVYYLNYFVGYLLAALSYCILVYFYPIKGIPGDAKITDRKWLEEWVEVEEFGTEREAFEEYGGVSTGYEKIRYI

SEQ ID NO: 122 - protein, 598 aa, Saccharomyces cerevisiae
MSFGSKVSRALRFLEIPVKDRASVSFLKNPDLQPIKSANQTWGFWSNFAYWGVMSFSVGTWMSASSALGVGLSYPETIGTFIVGDVLTIIFTLANSCPGYDWKVGFTLAQRFVFGIYGSAFGIIIRILMSIVNYGSNAWVGGLCINMILDSWSHHYLHLPNTLSSKVAMTTKELIGFIIFHVLTAFCYLMKPYHMNYILIWSCVATFFSMLGMVIYLAKQAHGVGELFTSTKSTATGSTKAWAWVYMISYWFGSVSPGSTNQSDYSRFGSSNWAIWAGTICALLIPTTLIPVFGVIGASTCDKLYGEQYWMPMDIFNHWLTTNYSAGARAGAFFCGLSFVLSQMSYTISNCGFASGMDLAGLLPKYVDIKRGALFAACVSWACLPWNFYNSSSTFLTVMSSFGVVMTPIISVMICDNFLIRKRQYSITNAFILKGEYYFTKGVNWRAIVAWVCGMTPGLPGIAWEVNNDYFHNTGIVNFFYGDSFFSFLISFFVYWGLCLLFPFKITVKHDDKDYYGAFTDEEARKKGMVPYSEISEEEIRAYTLGEGYTTGHEYRPEGSDDEIPELVKTSSENTNEFEIVHHKNNEKQSSTASEKAA

SEQ ID NO: 123 - protein, 599 aa, Saccharomyces cerevisiae
MSFGTRISRALRFLEIPVKNRASVNFLRNPDLQPIKSVNQTWGFWSNFAYWGVLSFNVGMWIGGSSALTVGLSYSETIGAFIIADLLTILFALANSCPGYDWKVGFTLAQRFVFGIYGSALGIIIRILMSIVYYGSNAWLGGLCVNMILDSWSHHYLHLPNTLSSKVAMTTKELIGFIIFHILTAFCYFMKPYHMNYILIWSCVGTFFAMLGMVIYLTKSAHGVGDLFTSTHSTVTGSKKAWAWVYTISYWYGSVSPGCTNQSDFSRFGSSNCAIWTGTIVALLIPATLIPVFGIIGASACEKLYGQTFWMPMDIFDNWLTTNYSAGARAATFFCGFCFVMSQISYTISNCGFASGMDLAGLLPKYVDIKRGAIFAACVSWACLPWNFYNSSSTFLTVMSSFGVVMTPIITVMICDNFLIRKRQYSVTNAFVLKGEYYFTKGVNWRAIVAWVCGMAPGLPGIAWEVNNDYFHNTGIINFFYGDSFFSFLISFFVYWGLCLLFPFKITVKHDDKDYYGAFTDEEARKKGMVPYSEISEEEIRAYTLGECFTSGHEYKPESSDDELPELTKTSSENTKVFEIVHQKDNEKESSTSSEKQIA

SEQ ID NO: 124 - protein, 598 aa, Saccharomyces cerevisiae
MSFSSIVSKFLRYLEIPAKNRTAVNFLRNPDLQPIKSANQTWGFWSNLAYWGAVSFTAGTWMSGSAALSVGLSYPETIVSFLLGNVLTIIFTMANSYPGYDWKIGFTLAQRFVFGIYGSAFGIIIRILMSIVNYGSNAWLGGLSINMILDSWSHHYLHLPNTLSPSVAMTTKQLVGFIIFHVLTALCYFMKPYHMNYLLIWSCVATCFAMLGIVIYLTKNAHGVGELFTSTKSTVTGSKRAWAWVYMISYWFGSISPGSTNQSDYSRFGSSNLAIWTGSVCALLIPATLVPIFGVISASTCDKLYGKQFWMPMDIFDYWLTNNYSAGARAGAFFCGLCFTMSQMSSTISNCGFATGMDMAGLLPKYVDIKRGALFCACISWACLPWNFYNSSSTFLTVMSSFGVVMTPIIAVMICDNFLIRKRQYSITNAFILKGEYYFTKGVNWRAIVAWVCGMAPGLPGIAWEVNNNYFHDSGIVKFFYGDSFFSFLISFFVYWGLCVFFPFKITVRHDDKDYYGAFTDEEARKKGMIPYSEISEEEIRAYTLGECYTTGHEYKPESSDNESPELIKTSSENTNVFEIVHQKDDEKHSFSTTQQVV

SEQ ID NO: 125 - protein, 533 aa, Saccharomyces cerevisiae
MLEEGNNVYEIQDLEKRSPVIGSSLENEKKVAASETFTATSEDDQQYIVESSEATKLSWFHKFFASLNAETKGVEPVTEDEKTDDSILNAASMWFSANMVIASYALGALGPMVFGLNFGQSVLVIIFFNIMGLIFVAFFSVFGAELGLRQMILSRYLVGNVTARIFSLINVIACVGWGIVNTSVSAQLLNMVNEGSGHVCPIWAGCLIIIGGTVLVTFFGYSVIHAYEKWSWVPNFAVFLVIIAQLSRSGKFKGGEWVGGATTAGSVLSFGSSIFGFAAGWTTYAADYTVYMPKSTNKYKIFFSLVAGLAFPLFFTMILGAASAMAALNDPTWKAYYDKNAMGGVIYAILVPNSLNGFGQFCCVLLALSTIANNIPNMYTVALSAQALWAPLAKIPRVVWTMAGNAATLGISIPATYYFDGFMENFMDSIGYYLAIYIAISCSEHFFYRRSFSAYNIDDWDNWEHLPIGIAGTAALIVGAFGVALGMCQTYWVGEIGRLIGKYGGDIGFELGASWAFIIYNILRPLELKYFGR

SEQ ID NO: 126 - protein, 579 aa, Saccharomyces cerevisiae
MNRDNMDTTKRKEDHTKHTTDVIEFYEEGTAASSLNIATEKANSSPSILRRIINRAAWLSKKVDAMGVESTGIQRISPYERGTSKKQFLHVAGLWLSATGGLSSMSSFLLGPLLFGLSFRESVASSLISVTIGCLIAAYCSIMGPQSGCRQMVTARYLFGWWFVKLVALASIIGVMGWSVVNSVVGGEMLAAISNDKVPLWVGIVIVTVCSFLVAIFGIKQVIKVETYLSVPVLTAFLLLYISSSDKYSFVNAYVSKGNLDSSTRKGNWMSFFSLCYSITATWGSITADYYILFPEDTPYIQIFCLTFFGTFLPTCFVGILGLLLASVAMSYKPWSVEYDSHGMGGLLWAGFQRWNGFGKFCVVVLVFSLVSNNIINTYSAAFSIQLSSVFCAKIPRWFWSIVCTIICLVCALIGRNHFSTILGNFLPMIGYWISMYFILLFEENLVFRRFFLHLYTKEFPTVTGEINGPELVGSSKEVEKDAVTNIHLLKRKHKVTKHRYNWDKWEDYEVLTHGYAATFAFIVGVAGVVVGMAQAYWIGPIAAKFGEYGGDVAMWLSMAFSGVVYPPCRYLELRKFGR

SEQ ID NO: 127 - protein, 735 aa, Saccharomyces cerevisiae
MGEFKPPLPQGAGYAIVLGLGAVFAGMMVLTTYLLKRYQKEIITAEEFTTAGRSVKTGLVAAAVVSSWIWCSTLLTSSTKEYADGIFGGYAYAAGACFQIIAFAILAIKTKQMAPNAHTYLELVRTRYGKIGHGCYLFYAIATNILVTSMLLTSGSAVFSDLTGMNTIASCFLLPVGVVVYTLFGGIKATFLTDYMHTCVIIIIVLVFAFKVYATSDVLGSPGKVYDLVREAAKRHPVDGNYQGEYMTMTSKSAGILLIINLIGNFGTVFLDNGYWNKAISASPAASLKAYAIGGLAWFAVPSLISLTMGLACLAVETSPNFPTYPDPLTSFQANSGLVLPAAAIAIMGKGGAVASLLMIFMAVTSAMSAELIAVSSVFTYDIYREYIDPRASGKKLIYTSHVACIFFGLAMSGFSVGLYYGGISMGYIYEMMGIIISSAVLPVVLTLCSKDMNLVAAVVSPILGTGLAIMSWLVCTKSLYKELTVDTTFMDYPMLTGNLVALLSPAIFIPILTYVFKPQNFDWEKMKDITRVDETAELVQADPDIQLYDAEANDKEQEEETNSLVSDSEKNDVRVNNEKLIEPNLGVVISNAIFQEDDTQLQNELDEEQRELARGLKIAYFLCVFFALAFLVVWPMPMYGSKYIFSKKFFTGWVVVMIIWLFFSAFAVCIYPLWEGRHGIYTTLRGLYWDLSGQTYKLREWQNSNPQDLHVVTSQISARAHRQSSHFGQVDEII

SEQ ID NO: 128 - protein, 601 aa, Saccharomyces cerevisiae
MLNHPSQGSDDAQDEKQGDFPVIEEEKTQAVTLKDSYVSDDVANSTERYNLSPSPEDEDFEGPTEEEMQTLRHVGGKIPMRCWLIAIVELSERFSYYGLSAPFQNYMEYGPNDSPKGVLSLNSQGATGLSYFFQFWCYVTPVFGGYVADTFWGKYNTICCGTAIYIAGIFILFITSIPSVGNRDSAIGGFIAAIILIGIATGMIKANLSVLIADQLPKRKPSIKVLKSGERVIVDSNITLQNVFMFFYFMINVGSLSLMATTELEYHKGFWAAYLLPFCFFWIAVVTLIFGKKQYIQRPIGDKVIAKSFKVCWILTKNKFDFNAAKPSVHPEKNYPWNDKFVDEIKRALAACKVFIFYPIYWTQYGTMISSFITQASMMELHGIPNDFLQAFDSIALIIFIPIFEKFVYPFIRRYTPLKPITKIFFGFMFGSFAMTWAAVLQSFVYKAGPWYNEPLGHNTPNHVHVCWQIPAYVLISFSEIFASITGLEYAYSKAPASMKSFIMSIFLLTNAFGSAIGCALSPVTVDPKFTWLFTGLAVACFISGCLFWLCFRKYNDTEEEMNAMDYEEEDEFDLNPISAPKANDIEILEPMESLRSTTKY

SEQ ID NO: 129 - protein, 799 aa, Saccharomyces cerevisiae
MSTIYRESDSLESEPSPTPTTIPIQINMEEEKKDAFVKNIDEDVNNLTATTDEEDRDPESQKFDRHSIQEEGLVWKGDPTYLPNSPYPEVRSAVSIEDDPTIRLNHWRTWFLTTVFVVVFAGVNQFFSLRYPSLEINFLVAQVVCYPIGRILALLPDWKCSKVPFFDLNPGPFTKKEHAVVTIAVALTSSTAYAMYILNAQGSFYNMKLNVGYQFLLVWTSQMIGYGAAGLTRRWVVNPASSIWPQTLISVSLFDSLHSRKVEKTVANGWTMPRYRFFLIVLIGSFIWYWVPGFLFTGLSYFNVILWGSKTRHNFIANTIFGTQSGLGALPITFDYTQVSQAMSGSVFATPFYVSANTYASVLIFFVIVLPCLYFTNTWYAKYMPVISGSTYDNTQNKYNVTKILNEDYSINLEKYKEYSPVFVPFSYLLSYALNFAAVIAVFVHCILYHGKDIVAKFKDRKNGGTDIHMRIYSKNYKDCPDWWYLLLQIVMIGLGFVAVCCFDTKFPAWAFVIAILISLVNFIPQGILEAMTNQHVGLNIITELICGYMLPLRPMANLLFKLYGFIVMRQGLNLSRDLKLAMYMKVSPRLIFAVQIYATIISGMVNVGVQEWMMHNIDGLCTTDQPNGFTCANGRTVFNASIIWSLPKYLFSSGRIYNPLMWFFLIGLLFPLAVYAVQWKFPKFKFAKHIHTPVFFTGPGNIPPSTPYNYSLFFAMSFCLNLIRKRWRAWFNKYNFVMGAGVEAGVAISVVIIFLCVQYPGGKLSWWGNNVWKRTYDNDYKKFYTLKKGETFGYDKWW

SEQ ID NO: 130 - protein, 877 aa, Saccharomyces cerevisiae
MSETVKDKVIIDEKVSTKGTVDYAEGAEYSERLSNHSSDFSQWYTDEQILHFMKKLGYENRTLYDIPEDVAYILKKMPELTLEDSFKILKDSIIYFKDDENIPHDQYEEWKRLVDLEDLDSKEGIDEYDSFDIRAFASAIKFHSPYQEVRAVVDPEDDPTIPVETFRAYFLAIIWSVIGSGFNEFFSHRVVSISLNTPIIQMFLYICGKAWAKTIPCWTITIRGRKYGINIDKPWTQKEQMFSTLLYAICQGAFYTHYNILTQKLFYHSAFSFGYQFLLSLSVQFIGFGFAGILRKFVVYPARALWPTVMPTIAINKALLGKEKHESGMSRYKFFFLTFFIMFIYNWFPTYIINILNTFNWMTWIKPSNINLANITGGVTGLGINPISSFDWNVISFNSPLVYPFWSYLTQYLGCILAALIVIAVYYSNYMSCQYLPIFTNSLYTNTGHSFKVTEVLDSDNKLDVKKYQSYSPPYYSAGNLVSYGAFICAYPLMITWSFIVHSKLLFNAFKDWALNLWAMRKLKSWVTMFKSDYRALDDYDDPHSNAMKNYKEVPDWWYFAILIGSLVVGIAVVEHYPTNTPVWGLFVCLGFNFVFLIPTTILQATTGYSFGLNLLIEMVMGYALPGNPIAIMILKAFGYNIDGQADNYVSNLKIAHYCKIPPMALFRGQCVIVFIQIFVNLGVLNWQISNIKDFCTPHQNAKFTCPDAVTYYNASVVWGAIGPKRIFNYIYPIFKWCWLIGACIGIFFGVWKRWGKFYPRYFDPMLFVGGMLNMSPPYNLMYYTSGMIVSYISQYYMKRHHLNLWEKYNYVLSAGFSTGLVLSAIIIFFAVQYKDTAFNWWGNTVPYAGADGVGYPLKNITDTANGYFGYAPGHYP

SEQ ID NO: 131 - protein, 275 aa, Saccharomyces cerevisiae
MTSSASSPQDLEKGVNTLENIETLPQQGSIAGVSQGFPNIQEIYSDRDFITLGSSTYRRRDLLNALDRGDGEEGNCAKYTPHQFANPVPLGLASFSLSCLVLSLINANVRGVTDGKWALSLFMFFGGAIELFAGLLCFVIGDTYAMTVFSSFGGFWICYGYGLTDTDNLVSGYTDPTMLNNVIGFFLAGWTVFTFLMLMCTLKSTWGLFLLLTFLDLTFLLLCIGTFIDNNNLKMAGGYFGILSSCCGWYSLYCSVVSPSNSYLAFRAHTMPNAP

SEQ ID NO: 132 - protein, 586 aa, Saccharomyces cerevisiae
MSRSNSIYTEDIEMYPTHNEQHLTREYTKPDGQTKSEKLNFEGAYINSHGTLSKTTTREIEGDLDSETSSHSSDDKVDPTQQITAETKAPYTLLSYGQKWGMVAILTMCGFWSSLGSPIYYPALRQLEKQFNVDENMVNVTVVVYLLFQGISPTVSGGLADCFGRRPIILAGMLIYVIASIGLACAPSYGVIIFLRCIQSIGISPTIAISSGVVGDFTLKHERGTFVGATSGFVLLGQCFGSLIGAVLTARWDWRAIFWFLTIGCGSCFLIAFLILPETKRTIAGNLSIKPKRFINRAPIFLLGPVRRRFKYDNPDYETLDPTIPKLDLSSAGKILVLPEIILSLFPSGLLFAMWTLMLSSISSGLSVAPYNYHLVIIGVCYLPGGIGGLMGSFFTGRIIDMYFKRKIKKFEQDKANGLIPQDAEINMFKVRLVCLLPQNFLAVVAYLLFGWSIDKGWRIESILITSFVCSYCAMSTLSTSTTLLVDLYPTKSSTASSCFNFVRCSLSTIFMGCFAKMKAAMTVGGTFTFLCALVFFFNFLMFIPMKYGMKWREDRLLKQQRQSWLNTLAVKAKKGTKRDQNDNHN

SEQ ID NO: 133 - protein, 586 aa, Saccharomyces cerevisiae
MSDHSPISNKENHLLPSDSSRSSSSDMHSTGTTGTTGVEPVDFTGEGAKYTTATEGNGGADLAIQRTTTMNSAAESEVNITRRLTKILTGSVNEPDRVEVDYTNCAPMGGDRPYPPSLPSRDLYEVTFDGPNDPLHPFNWPMKKKVLLCLVLCLDSIAIAMCSSIFASAVPQICEIYHVIEVVAILGITLFVLGFAASPVIYAPLSELYGRKGVLVLSAFGFALFQFAVATAENLQTIFICRFFGGFIGAAPMAVVPAAFADMFDTNVRGKAIALFSLGVFVGPILSPVMGSYIAQRTTWRWLEYVVGCFASAVFVAIVLFFEETHHPTILVNKAKQMRKQSNNWGIHAAHEDVELSIKDIVQKTVTRPIIMLFVEPLLLFVTIYNSFVYGILYLLLEAYPLVFVEGYGFTENGELPYIALIIGMMVCAAFIWYMDNDYLKRCRAKGKLVPEARLYAMVIAGTVFPIGILWFCWTGYYPHKIHWMVPTVGGAFIGFGLMGIFLPCLNYIIESYLLLAASAVAANTFMRSAFGACFPLFAGYMFRGMGIGWAGLLLGLFAAAMIPVPLLFLKYGESIRKKSKYAYAA

SEQ ID NO: 134 - protein, 902 aa, Saccharomyces cerevisiae
MEQINSNSRKKKQQLEVFKYFASVLTKEDKPISISNGMLDMPTVNSSKLTAGNGKPDTEKLTGELILTYDDFIELISSSKTIYSKFTDHSFNLNQIPKNVFGCIFFAIDEQNKGYLTLNDWFYFNNLLEYDNYHLIILYEFFRKFDVENLKAKQKKELGSSSFNLKAADDRIKSINYGNRFLSFDDLLLNLNQFKDTIRLLHESIDDNFVKDNKLLLDWNDFRFLKFYKCYHENEEYLSLNSLVTILQNDLKNEKIFIGFDRLAQMDSQGHRLALSKNQLTYLLRLFYSHRVSADIFSSLNLSNTELLKADNNSIPYNVFKDIFYLFQNFDLLNQIFHKYVTENNLNEQDIREQIVTKNDFMTVLNAQYNKVNNIIEFSPSQINLLFSIVANSKENRRLRKRNQDRDDELLNDHHYDSDIDFFIHNEYLHGVSRSRKNLESFNDYYHDLSDGFDQDSGVKKASKASTGLFESVFGGKKDKATMRSDLTIEDFMKILNPNYLNDLVHQMELQKNQNESLYINYYFYPIFDSLYNFSLGSIAGCIGATVVYPIDFIKTRMQAQRSLAQYKNSIDCLLKIISREGIKGLYSGLGPQLIGVAPEKAIKLTVNDFMRNRLTDKNGKLSLFPEIISGASAGACQVIFTNPLEIVKIRLQVQSDYVGENIQQANETATQIVKKLGLRGLYNGVAACLMRDVPFSAIYFPTYAHLKKDLFDFDPNDKTKRNRLKTWELLTAGAIAGMPAAFLTTPFDVIKTRLQIDPRKGETKYNGIFHAIRTILKEESFRSFFKGGGARVLRSSPQFGFTLAAYELFKGFIPSPDNKLKSREGRKRFCIDDDAGNEETVVHSNGELPQQKFYSDDRKHANYYYKSCQIAKTFIDLDNNFSRFDSSVYKNFQEHLRSING

SEQ ID NO: 135 - protein, 310 aa, Saccharomyces cerevisiae
MTSIDNRPLPFIYQFTAGAIAGVSELLVMYPLDVVKTRMQLQVTTKGHPAVVAAKAAVDHYTGVMDCLTKIVKKEGFSHLYKGITSPILMEAPKRAIKFSGNDTFQTFYKKIFPTPNGEMTQKIAIYSGASAGAVEAFVVAPFELVKIRLQDVNSQFKTPIEVVKNSVVKGGVLSLFNGLEATIWRHVLWNAGYFGIIFQIRKLLPAAKTSTEKTRNDLIAGAIGGTVGCLLNTPFDVVKSRIQRSSGPLRKYNWSLPSVLLVYREEGFKALYKGFAPKVMRLAPGGGLLLVVFTNVMDFFREVKYGKKQ

SEQ ID NO: 136 - protein, 307 aa, Saccharomyces cerevisiae
MSSDSNAKPLPFIYQFISGAVAGISELTVMYPLDVVKTRFQLEVTTPTAAAVGKQVERYNGVIDCLKKIVKKEGFSRLYRGISSPMLMEAPKRATKFACNDQYQKIFKNLFNTNETTQKISIAAGASAGMTEAAVIVPFELIKIRMQDVKSSYLGPMDCLKKTIKNEGIMGLYKGIESTMWRNALWNGGYFGVIYQVRNSMPVAKTKGQKTRNDLIAGAIGGTVGTMLNTPFDVVKSRIQSVDAVSSAVKKYNWCLPSLLVIYREEGFRALYKGFVPKVCRLAPGGSLMLVVFTGMMNFFRDLKYGH

SEQ ID NO: 137 - protein, 292 aa, Saccharomyces cerevisiae
MEDSKKKGLIEGAILDIINGSIAGACGKVIEFPFDTVKVRLQTQASNVFPTTWSCIKFTYQNEGIARGFFQGIASPLVGACLENATLFVSYNQCSKFLEKHTNVSPLGQILISGGVAGSCASLVLTPVELVKCKLQVANLQVASAKTKHTKVLPTIKAIITERGLAGLWQGQSGTFIRESFGGVAWFATYEIVKKSLKDRHSLDDPKRDESKIWELLISGGSAGLAFNASIFPADTVKSVMQTEHISLTNAVKKIFGKFGLKGFYRGLGITLFRAVPANAAVFYIFETLSAL

SEQ ID NO: 138 - protein, 299 aa, Saccharomyces cerevisiae
MSSKATKSDVDPLHSFLAGSLAGAAEACITYPFEFAKTRLQLIDKASKASRNPLVLIYKTAKTQGIGSIYVGCPAFIIGNTAKAGIRFLGFDTIKDMLRDSETGELSGTRGVIAGLGAGLLESVAAVTPFEAIKTALIDDKQSATPKYHNNGRGVVRNYSSLVRDKGFSGLYRGVLPVSMRQAANQAVRLGCYNKIKTLIQDYTDSPKDKPLSSGLTFLVGAFSGIVTVYSTMPLDTVKTRMQSLDSTKYSSTMNCFATIFKEEGLKTFWKGATPRLGRLVLSGGIVFTIYEKVLVMLA

SEQ ID NO: 139 - protein, 324 aa, Saccharomyces cerevisiae
MSSDNSKQDKQIEKTAAQKISKFGSFVAGGLAACIAVTVTNPIELIKIRMQLQGEMSASAAKVYKNPIQGMAVIFKNEGIKGLQKGLNAAYIYQIGLNGSRLGFYEPIRSSLNQLFFPDQEPHKVQSVGVNVFSGAASGIIGAVIGSPLFLVKTRLQSYSEFIKIGEQTHYTGVWNGLVTIFKTEGVKGLFRGIDAAILRTGAGSSVQLPIYNTAKNILVKNDLMKDGPALHLTASTISGLGVAVVMNPWDVILTRIYNQKGDLYKGPIDCLVKTVRIEGVTALYKGFAAQVFRIAPHTIMCLTFMEQTMKLVYSIESRVLGHN

SEQ ID NO: 140 - protein, 459 aa, Saccharomyces cerevisiae
MPSNVRSGVLTLLHTACGAGVLAMPFAFKPFGLMPGLITLTFCGICSLCGLLLQTRIAKYVPKSENASFAKLTQLINPSISVVFDFAIAVKCFGVGVSYLIIVGDLVPQIVQSIFYRNDDNMSGSQEHHMFLDRRLYITLIIVFVISPLCFKRSLNSLRYASMIAIVSVAYLSGLIIYHFVNRHQLERGQVYFMVPHGDSQSHSPLTTLPIFVFAYTCHHNMFSVINEQVDKSFKVIRRIPIFAIVLAYFLYIIIGGTGYMTFGENIVGNILTLYPNSISTTIGRLAMLLLVMLAFPLQCHPCRSSVKNIIIFIENFRKGKLYDNRASFIPLDNFNSEDPQEAPTQQNNEEPNLRSESLRHINIITLCILLFSYLLAISITSLAKVLAIVGATGSTSISFILPGLFGYKLIGSEFTGTNERVPTSIKIFKYLSLSLFIWGIAVMVASLSAIVFLGTSSH

SEQ ID NO: 141 - protein, 357 aa, Saccharomyces cerevisiae
MTRDSPDSNDSYKHINKNTTQKTSFDRNSFDYIVRSGLAGGISGSCAKTLIAPLDRIKILFQTSNPHYTKYTGSLIGLVEAAKHIWINDGVRGFFQGHSATLLRIFPYAAVKFVAYEQIRNTLIPSKEFESHWRRLVSGSLAGLCSVFITYPLDLVRVRLAYETEHKRVKLGRIIKKIYKEPASATLIKNDYIPNWFCHWCNFYRGYVPTVLGMIPYAGVSFFAHDLLHDVLKSPFFAPYSVLELSEDDELERVQKKQRRPLRTWAELISGGLAGMASQTAAYPFEIIRRRLQVSALSPKTMYDHKFQSISEIAHIIFKERGVRGFFVGLSIGYIKVTPMVACSFFVYERMKWNFGI

SEQ ID NO: 142 - protein, 307 aa, Saccharomyces cerevisiae
MSEEFPSPQLIDDLEEHPQHDNARVVKDLLAGTAGGIAQVLVGQPFDTTKVRLQTSSTPTTAMEVVRKLLANEGPRGFYKGTLTPLIGVGACVSLQFGVNEAMKRFFHHRNADMSSTLSLPQYYACGVTGGIVNSFLASPIEHVRIRLQTQTGSGTNAEFKGPLECIKKLRHNKALLRGLTPTILREGHGCGTYFLVYEALIANQMNKRRGLERKDIPAWKLCIFGALSGTALWLMVYPLDVIKSVMQTDNLQKPKFGNSISSVAKTLYANGGIGAFFKGFGPTMLRAAPANGATFATFELAMRLLG

SEQ ID NO: 143 - protein, 329 aa, Saccharomyces cerevisiae
MSEEFPTPQLLDELEDQQKVTTPNEKRELSSNRVLKDIFAGTIGGIAQVLVGQPFDTTKVRLQTATTRTTTLEVLRNLVKNEGVFAFYKGALTPLLGVGICVSVQFGVNEAMKRFFQNYNASKNPNMSSQDVDLSRSNTLPLSQYYVCGLTGGVVNSFLASPIEQIRIRLQTQTSNGGDREFKGPWDCIKKLKAQGGLMRGLFPTMIRAGHGLGTYFLVYEALVAREIGTGLTRNEIPPWKLCLFGAFSGTMLWLTVYPLDVVKSIIQNDDLRKPKYKNSISYVAKTIYAKEGIRAFFKGFGPTMVRSAPVNGATFLTFELVMRFLGEE

SEQ ID NO: 144 - protein, 284 aa, Saccharomyces cerevisiae
MNTFFLSLLSGAAAGTSTDLVFFPIDTIKTRLQAKGGFFANGGYKGIYRGLGSAVVASAPGASLFFISYDYMKVKSRPYISKLYSQGSEQLIDTTTHMLSSSIGEICACLVRVPAEVVKQRTQVHSTNSSWQTLQSILRNDNKEGLRKNLYRGWSTTIMREIPFTCIQFPLYEYLKKTWAKANGQSQVEPWKGAICGSIAGGIAAATTTPLDFLKTRLMLNKTTASLGSVIIRIYREEGPAVFFSGVGPRTMWISAGGAIFLGMYETVHSLLSKSFPTAGEMRA

SEQ ID NO: 145 - protein, 602 aa, Saccharomyces cerevisiae
MPEQEPLSPNGRKRSEVHYISIPLNRGSAFSPDDSVSQFQSDGFMTRRQSILDHPVGSFKGVNSLSRFATSLRRANSFRNIELNADNERSFFKESNDETYDPDTLAPALDGRRLSVTLNNAGRPRITNLANNDRVSTASMAIHDDDYGSIQNSTIGDSGSILRPTASLTEMMSGGAGRRFTNNDMDSIVVKRVEGVDGKVVTLLAGQSTAPQTIFNSINVLIGIGLLALPLGLKYAGWVIGLTMLAIFALATFCTAELLSRCLDTDPTLISYADLGYAAFGTKGRALISALFTLDLLGSGVSLVILFGDSLNALFPQYSTTFFKIVSFFIVTPPVFIPLSVLSNISLLGILSTTGTVLVICCCGLYKSSSPGSLVNPMETSMWPIDLKHLCLSIGLLSACWGGHAVFPNLKTDMRHPDKFKDCLKTTYKITSVTDIGTAVIGFLMFGNLVKDEITKNVLLTEGYPKFVYGLISALMTIIPIAKTPLNARPIVSVLDVLMNVQHIDEAASAIKRRAAKGLQVFNRIFINVVFVLIAINFPEFDKIIAFLGAGLCFTICLILPCWFYLRLCKTTIKPWERVACHVTICISVVLSTLGVGAAIIS

SEQ ID NO: 146 - protein, 480 aa, Saccharomyces cerevisiae
MSELGEYSKLENKELRTEFELTNFPFPGTTDNDSDDGSQGQNSLNIITPDMDDTLVNDVLRENDKKSSMRMAFMNLANSILGAGIITQPFAIKNAGILGGLLSYVALGFIVDWTLRLIVINLTLAGKRTYQGTVEHVMGKKGKLLILFTNGLFAFGGCIGYCIIIGDTIPHVLRAIFSQNDGNVHFWLRRNVIIVMVTTFISFPLSMKRNIEALSKASFLAVISMIIIVLTVVIRGPMLPYDWKGHSLKLSDFFMKATIFRSLSVISFALVCHHNTSFIFFSMRNRSVAKFTRLTHISIIISVICCALMGYSGFAVFKEKTKGNVLNSFPGTDTAINIARLCFGFNMLTTFPMEIFVLRDVVGNLLHECNLIKNYDEHTQLSGKQHVVITSSLVFITMGISLTTCNLGALFELIGATTASTMAYILPPYTNLLLTSKKKSWKERLPFYLCICFGFMIMIISSTQTIIDAVNGSDGQHCQI

SEQ ID NO: 147 - protein, 692 aa, Saccharomyces cerevisiae
MNGKEVSSGSGRTQSNNNKKNNNGGSTGISHASGSPLTDGNGGNSNGNSRSRSRSRKSSGTTGGLLKKPPLLVNNEAVHASVPDASHTSCNNGTLEVSINNPEPHVVDAVARHLIRNPSNSLQLQGGDITRDLYKWTNDHPSSPSQYQYPSQPALSTSIPSQAPSFSNRKRSMSFSAASIASSSHLNNNSEANGNPLAAIGLAPAPMTHEEIRAPGGFRRSFIIQKRRKHNVDAPIPNFFTRNFIEFLTLYGHFAGEDLSEEEEEEEETEEEPEEEALETESTQLVSREHGRHPHKSSTVKAVLLLLKSFVGTGVLFLPKAFHNGGWGFSALCLLSCALISYGCFVSLITTKDKVGVDGYGDMGRILYGPKMKFAILSSIALSQIGFSAAYTVFTATNLQVFSENFFHLKPGSISLATYIFAQVLIFVPLSLTRNIAKLSGTALIADLFILLGLVYVYVYSIYYIAVNGVASDTMLMFNKADWSLFIGTAIFTFEGIGLLIPIQESMKHPKHFRPSLSAVMCIVAVIFISCGLLCYAAFGSDVKTVVLLNFPQDTSYTLTVQLLYALAILLSTPLQLFPAIRILENWTFPSNASGKYNPKVKWLKNYFRCAIVVLTSILAWVGANDLDKFVSLVGSFACIPLIYIYPPLLHYKASILSGTSRARLLLDLIVIVFGVAVMAYTSWQTIKMWSQ

SEQ ID NO: 148 - protein, 713 aa, Saccharomyces cerevisiae
MVTNNGDGEHLGIRRNGNLRHPSNNMKIPRRAQSTVLNSNPFYSRKYSMSTLTPRDICRSVDSRVFVDMSSPNFQTLEDPHRDEIINSVRLNYLNSSKRSSVSHGNEAIPRVNPTKNSSASTIAAANVDSDDDETNLSSAGGDITHDIYKLVKAEDPKRLRRPRSMENVTPKIEHHTKLSSASGLNVPGGFRREFIVNKKRQEHQLNDSASSDFTSHESDSINQSSPSSNQDIDKVPFLTRNFLEFLYVFGHFAGESFEDDFIPDSSNMMIRGEDERSALLSRPDHMKVLPSAKGTTSTKKVFLILLKSFIGTGVLFLPNAFHNGGLFFSVSMLAFFGIYSYWCYYILVQAKSSCGVSSFGDIGLKLYGPWMRIIILFSLVITQVGFSGAYMIFTAKNLQAFLDNVFHVGVLPLSYLMVFQTIIFIPLSFIRNISKLSLPSLLANFFIMAGLVIVIIFTAKRLFFDLMGTPAMGVVYGLNADRWTLFIGTAIFAFEGIGLIIPVQDSMRNPEKFPLVLALVILTATILFISIATLGYLAYGSNVQTVILLNLPQSNIFVNLIQLFYSIAIMLSTPLQLFPAIKIIENKFFPKFTKIYVKHDDLTTRVELRPNSGKLNWKIKWLKNFIRSIIVIIVVSIAYFGSDNLDKFVSVIGSLACIPLVYIYPSMLHLRGNSLPETKGEFWRFKPMLDTILIFFGIASMLYTSYQSIFGV

SEQ ID NO: 149 - protein, 459 aa, Saccharomyces cerevisiae; identical to SEQ ID NO: 140

SEQ ID NO: 150 - protein, 448 aa, Saccharomyces cerevisiae
MVASIRSGVLTLLHTACGAGILAMPYAFKPFGLIPGVIMIVLCGACAMQSLFIQARVAKYVPQGRASFSALTRLINPNLGIVFDLAIAIKCFGVGVSYMIVVGDLMPQIMSVWTRNAWLLNRNVQISLIMLFFVAPLSFLKKLNSLRYASMVAISSVAYLCVLVLLHYVAPSDEILRLKGRISYLLPPQSHDLNVLNTLPIFVFAYTCHHNMFSIINEQRSSRFEHVMKIPLIAISLALILYIAIGCAGYLTFGDNIIGNIIMLYPQAVSSTIGRIAIVLLVMLAFPLQCHPARASIHQILQHFAEENVSISATSADEPTVATESSPLIRDSSLDLNEVIEEESIYQPKETPLRGKSFIVITCSILVASYLVAISVSSLARVLAIVGATGSTSISFILPGLFGYKLIGTEHKTAVPLTTKIFKYTGLLLFIWGLIIMITCLTAALKLN

SEQ ID NO: 151 - protein, 490 aa, Saccharomyces cerevisiae
MEATSSALSSTANLVKTIVGAGTLAIPYSFKSDGVLVGVILTLLAAVTSGLGLFVLSKCSKTLINPRNSSFFTLCMLTYPTLAPIFDLAMIVQCFGVGLSYLVLIGDLFPGLFGGERNYWIIASAVIIIPLCLVKKLDQLKYSSILGLFALAYISILVFSHFVFELGKGELTNILRNDICWWKIHDFKGLLSTFSIIIFAFTGSMNLFPMINELKDNSMENITFVINNSISLSTALFLIVGLSGYLTFGNETLGNLMLNYDPNSIWIVIGKFCLGSMLILSFPLLFHPLRIAVNNVIIWIEITYGGANPEEDPQVSEYTRASNLRPISMTVEDPAQPSDALDATSYNEQECLLPNGNFDNGSIESQENNNDERGTMAVAGDNEHHAPFVKSRFYWITALLLISMYTLALSVQSFALVLSFVGATGSTSISFTLPGLLGYKLIGLDSLAIGKMIPPKDRFYKRCSLLLVFYGLSVMFLSLYVTVFNRSDEA

SEQ ID NO: 152 - protein, 562 aa, Saccharomyces cerevisiae
MQTLDETSNLLPPPEEAEAPPLEQKFHEYNLALPKFPILFSLWLGSFLSSLDSTIVANIMNRVAEEFSESSKKQWIATSFLLTNTAFQPLYGKLSDITGRKSALLTAQFFFGLGCLLTCFARNVTEFSIARAICGIGAGGLNAISSIAVSDICTARERGVYQGYANIVFGFGQLLGAPLGGVFIETIGWRALFGIQVPVIMLCSVLAIKNINIKLFHVPPMKERYTLKNLSRIDIFGSLSLVATISGVLFLCSSQLNKLYLALFTIGSFIVFILVERYYATEKILPFELLTRSFCLSSAVTVISSFVVFGEIFRSPIYLQLLQNISVTKTGLFLIFPSISVAVGSLVTGWVLRNTKINLAHCAYQIIFGGMIMQLLGLGLGYFLLSHLNPDYTIYDMLESITFRSNSIWWKLIYVFASVLVSFGYACLLVATLVSIVFTVEKSQQGTMTGVFYLWRSIGNVLGASLTLVSYENSLSSMLWNYMFKTKRDDEYHFTKKQYYSLINDSSYLRGPNFPTDIFVRILDVYKKAFLISYIPNIALAAVGIVLSLYLVKHTYKRSSSS

SEQ ID NO: 153 - protein, 474 aa, Saccharomyces cerevisiae
MSISNWITTAYLITSTSFQPLYGSFSDALGRRNCLFFANGAFTIGCLACGFSKNIYMLSFMRALTGIGGGGLITLSTIVNSDVIPSSKRGIFQAFQNLLLGFGAICGASFGGTIASSIGWRWCFLIQVPISVISSILMNYYVPNQKEYNRQNSSIFQNPGKILRDIDVMGSILIITGLTLQLLYLSLGCSTSKLSWTSPSVLLLLVGSVIILLLFILHERKTSARAIIPMELVNSSYSVVVLSISILVGFASYAYLFTLPLFFQIVLGDSTAKAGLRLTIPSLFTPVGSLITGFSMSKYNCLRLLLYIGISLMFLGNFLFLFIEKTSPNWLIGLFLIPANLGQGITFPTTLFTFIFMFSKSDQATATSTLYLFRSIGSVWGVAISAGVIQLSFAGLLRSNLKGLLDENKIKKLIVQLSANSSYIGSLHGEVKNTVIKSFDEATKRAHLMSTLLSSLALILCILKDNLAKPKTRR

SEQ ID NO: 154 - protein, 458 aa, Saccharomyces cerevisiae
MNMLIVGRVVASVGGSGLQTLCFVIGCTMVGERSRPLVISILSCAFAVAAIVGPIIGGAFTTHVTWRWCFYINLPIGGLAIIMFLLTYKAENKGILQQIKDAIGTISSFTFSKFRHQVNFKRLMNGIIFKFDFFGFALCSAGLVLFLLGLTFGGNKYSWNSGQVIAYLVLGVLLFIFSLVYDFFLFDKFNPEPDNISYRPLLLRRLVAKPAIIIINMVTFLLCTGYNGQMIYSVQFFQLIFASSAWKAGLHLIPIVITNVIAAIASGVITKKLGLVKPLLIFGGVLGVIGAGLMTLMTNTSTKSTQIGVLLLPGFSLGFALQASLMSAQLQITKDRPEAAMDFIEVTAFNTFMKSLGTTLGGVLSTTVFSASFHNKVSRAHLEPYEGKTVDDMILYRLQNYDGSHSTIGNILSDSIKNVFWMDLGFYALGFLFCSFSSNKKLIIPKKDETPEDNLEDK

SEQ ID NO: 155 - protein, 768 aa, Saccharomyces cerevisiae
MGKKDRQRKKLREFAKLKNRQRNLRKSVQTLKNEVQREAKVPRTSNQIALGNDKIEEINENSPLLSAPSKQEEVSIPKAVDIDTIDAQPLHEGPKIDDSPQDEVNSIKGKPADKANEDDLKPPSQHEACGNSALQSSITDFSDRSVSPLQSITSCNTPMSEHELPVSSSNSFERADDMPVVQADNQTSSSKSLHIVAPSPEVPVSGDEITSYGYGSIPQSIGDVENGLNPPYVENTSSDELVHDLTRRRIFSSCMCTYLFFIAMDSSIILVIASKIASEFHELWRLSLVISAYLLSNAIGQLVFLKLSLISSVKLLLCIAQFSFILGGYLSWSSAHFWTFIFARCVTGFGGGSLIALKSTIMNRFSQKNDSRYSLSASMITFAMGVVIGPFMMNLFDSSHGSGWRNAFLIPVPFCLVNASIMLADMYSVKSTLYGRPTPTLWKRFKNTLLSPDLYEILTLTLFLLCFVQVTSLDLTGLKNNTMIQALLFSVIIVCGILFFLIETSDTYMNSVISMSLQGDKRLIWTMIGISFCFAALMCIIPFGTTYFIIVLNLSTLQLAERLSPFFFSIVLGYFSVSYFWKSKGQNFLLKFVLSGATLLLYVALMGVSLNLPVWKQYICLSLPFLGSSMILTLLSNLYHEYHEQRKSPISGSIVYCFGAVGGTVGISLGGYVFHKTLIKLMHEKVMPFSKQGYLKKDLLKIIKHATESSDWVHESAPKFVFQTLIECYLQACRNVFKLSTLFFTITVVAIFIFNRIHCRSQNCLSLS

SEQ ID NO: 156 - protein, 582 aa, Saccharomyces cerevisiae
MEETKYSSQQEIEGACGSDASLNARGSNDSPMGLSLYLCLASLTLVLFITALDILIVGTIIDVVAEQFGNYSKTGWLVTGYSLPNAILSLIWGRFASIIGFQHSLILAILIFEAGSLIAALASSMNMLIFGRVVAGVGGSGLQTLCFVIGCTMVGERSRPLVISILSCAFAVAAIVGPIIGGAFTTHVTWRWCFYINLPIGGLAIIMFLLTYKAENKGILQQIKDAIGTISSFTFSKFRHQVNFKRLMNGIIFKFDFFGFALCSAGLVLFLLGLTFGGNKYSWNSGQVITYLVLGVLLFIFSLVYDFFLFDKFNPEPDNISYRPLLLRRLVAKPAIIIVNMVTFLLCTGYNGQMIYSVQFFQLIFASSAWKAGLHLIPIVITNVIAAIASGVITKKLGLVKPLLIFGGVLGVIGAGLMTLMTNTSTKSTQIGVLLLPGFSLGFALQASLMSAQLQITKDRPEAAMDFIEVTAFNTFMKSLGTTLGGVLSTTVFSASFHNKVSRAHLEPYEGKTVDDMILYRLQNYDGSHSTIGNILSDSIKNVFWMDLGFYALGFLFCSFSSNKKLIIPKKDDTPEDNLEDK

SEQ ID NO: 157 - protein, 528 aa, Saccharomyces cerevisiae
MSYGTINDMNESVTNYRIKKAQNNIKGWYAYSFSSEPFVVSAVSTYIPLLLQQFASINGVKVHDHSIPCLSETGSDSDKCVLGLFNNRIFVDTSSFALYVFSLSVLFQTIIVISVSGIVDLWGSVKFKGRILVWFGIVGALSTVAISKLNDTQIYSLAGLYIVANGCFGVINVVGNSLLPIFVKDSLKCQSQGAYEPDKVDSLTTVISGRGASLGYSSALIVQIVSMFLVASKKGSKQDVQVAVLFVGIWWFVWQLPMIWLIDDVTIPIRVDDSTLASARSPYPGEQDALGQLNWKNYLSYGWVSLFESFKHARLLKDVMIFLIAWFIISDSITTINSTAVLFSKAELHMSTLNLIMISVLTVVNAMLGAFMIPQFLATKFRWTSSQTLMYIIIWASFIPFYGILGFFFNAFGLKHKFEMFLLAIWYGLSLGGLSAVSRSVFSLIVPPGKESTFFSMFSITDKGSSILGPFLVGLLTDKTHNIRYSFYFFFLLLMLSLPVLNCLDVKRGRREAEELSQVLPESERRLD

SEQ ID NO: 158 - protein, 590 aa, Saccharomyces cerevisiae; identical to SEQ ID NO: 96

SEQ ID NO: 159 - protein, 611 aa, Saccharomyces cerevisiae; identical to SEQ ID NO: 98

SEQ ID NO: 160 - protein, 296 aa, Saccharomyces cerevisiae
MKLIPIILNAKNLSGMAGSISICCWIVVFVPQIYENFRRQSAEGLSLLFIVLWLLGDIFNVMGAMMQNLLPTMIILAAYYTLADLILLIQCMWYDKEKKSILQEVKKNVDPVHLPPANPINETVLQDVFNEYEPLLPRIEEEDSQSYSSLELGRTIVVKERENFFNDFLIVSGVLIAGILSWYISYCSGLDNGIPKKKPAFEQINLPAQILGYLSAILYLGSRIPQIVLNFKRKSCEGVSFLFFLFACLGNTSFIISVLSASWLIGSAGTLLMDFTVFIQFFLYAKPKYEKILIDN

SEQ ID NO: 161 - protein, 725 aa, Saccharomyces cerevisiae
MPQSTPSQEVQRVPWDNKPALKQITLRATIAGIAIGSLVLTSNFQFGLQTGWVSMMSLPSALLACAFFKNIWPLIFPNDRPFSDVENVYVQSMAVAVGTGPLAFGFVGVIPAIEKFLTNDESGGLREQGQSFTFRELLIWSTALAFFGIFFAVPLRKQVIVREKLPFPSGSATATLISVLNGTEILQEVSKSELLEMRQRRLNECPEVLQPNRDPEEADYLMNSSHSELGDYTATSQDGSSILSTGSENYRANIIILLKTFVVSSLYTMVSYFVPVIRSIPVFGKYLSNNYLWNFQPSPAYIGQGIIMGLPTVSYMLIGCFLGWGVLAPLARYKRWVPPDADVHDWEEGVQGWILWSSLSIMVADSVVAFIVVTVKSIVKFILIDDKAALLNNIIDDTFQSMLLEEERAINSSRRNTYVDGRQDTVRLVSRDNEIEVDSKHLVRYTTVISGCLVSSIICIVSIIYLFGIQVIPLYAIITALILALFLSILGIRALGETDLNPVSGIGKISQLIFAFIIPRDRPGSVLMNVVSGGIAEASAQQAGDLMQDLKTGHLLGASPRAQFCAQLIGACWSIILSSFMYLCYNKVYSIPSEQFRIPTAVVWIDCARLVTGKGLPDKALECSMILGVIFAVLSLIRNTYRDYGYGWILYIPSGVAVGVGIFNSPSFTIARFIGGWASHFWLKNHRGDLNAKTKMIVFSSGLVLGEGIFSVINMLFICLNVPHY

SEQ ID NO: 162 - protein, 735 aa, Saccharomyces cerevisiae; identical to SEQ ID NO: 127

SEQ ID NO: 163 - protein, 584 aa, Torulaspora microellipsoides
MSKLIPIASPALSMMTSRAYDEVKNENVEKGEQGSVDEKGEYVDVLGREIISSETEKHGNLPLQAYVHYAGIQREFERERDEDGLYAVQREQMYTDPHSNVSPSKLDSQRMLRIAKAYSVFFLITTDILGPSNAPYAVAQMGWVPGVILYVIFGVAAAFGGWLLNFCFCKVDSNNYPIRTFSDLAARVVAPWFRYPFGLLQFIQMILNCGLLLLSTAQSVSQMLVVNRGGDHFCFTVDILVWGLLCMIMGQIRSLGRFAHIANSAVWMNIAICIITMVGVALGGPYYGIFEQYGQGAPYFQPSSYIPLPIKQYAIVPGNISDKIAGMNNMVFAWGGATIFCEVMAEMRRPMDFWKGMLCAQSLILVVYLFYGLFVYAYNGQFSYVTANMAIGSIGLQNAGNVLTIITGIIAMVLYGNIGIKVIYQGFLVTDFNFPSLTSRKGTFAWAGFVVVYWAIAYILGTAIPSISALVAIVGAFCILNFSYTFPFLFGFCLLCRQDAALADNFDAKTLTVEKADSYRSWSRWKRALGYGGTYRILIKVSLFLLFLASLATCGLCSYSAISGAIAVYQTNPAQPFTCTSPVA

SEQ ID NO: 164 - protein, 583 aa, Torulaspora microellipsoides
MSKLVPIASPNLSMMTSRAYDEAKKEKGSQGTIDHEKGEYVDISGREIISSESEKHGRQLPLQAYVHYAEIQREFERERDEDGLYAVQREQMYTDPHSNVSPSKLDSQRMLRIAKAYSVFFLITTDILGPSNAPYAVAQMGWVPGVILYVLFGVAAAFGGWLLNFCFCKVDSNNYPIRTFSDLAARVVAPWFRYPFGLLQFIQMILNCGLILLSTAQSVSQMLVVNRGGDDFCFTVDILVWGLLCMILGQIRSLGRFAHIANSAVWMNIAICIITMVGVAVGGPYYGIFEQYGQGAPYFQPSSYIPLPIKQYAIVPGNISDKIAGMNNMVFAWGGATIFCEVMAEMRRPMDFWKGMLCAQSLILVVYLFYGLFVYAYNGQFSYVTANMAIGSIGLQNAGNVLSIISGIIAMVLYGNIGIKVVYQGFLVTDFNFPSLTSRKGTFAWGGFVILYWAVAYILGTAIPSISALVGIVGAFCILNFSYTFPFLFGFCLLCRQDAALADNFDAKTLTVEKADSYREWSRWKRALGYGGIYRTSIKVSLFLLFLASLATCGLCSYSAISGAIAVYQTNPAQPFTCTSPVA

SEQ ID NO: 165 - protein, 905 aa, Candida albicans
MDEKNPTTELSVPNIEAVGSHLQVQDHEINLQAIISNPLSIGEVATTLTESQKWFVLKRLHFDALVSLDELPPQASFIFEKIEQMTTEEAVEILEKNIEEHETDVNIPENDLVLWKELVENSHKFTKVQLQEKLGSNSSSSVEGEKTADVEKGHEIVDWDLQVRLEAVLVAYWSPYPEVRAVTFPYDDPTIPAETFRVYLIAIIWTAIGAVINQFFVERQPAITLAMSVVQVFLYPSGLLCEWILPKWKFKIWKLSIDLNPGPYTYKEQMLATIFCGVTGGGTSYVSSNILMQKSEIFYDNKWVDFGYQVLLILSTNFLGIGLAGIMRKFAVYPTKAVWPSILPGLALNKTLLTPAKKEVINGWKISGYNFFFIAFVASFLYFWVPDYLFQALSTFNWMTWIKPDNQNLAVVTGSVGGLGLNPITTFDWNYFSSMLQPLQVPFFYPVNNIIGMAIAFFCIIGVWYSNYKWTGYLPINDNGLYTNTGEPYSVRSVVDANSLFDQAKYAEMGPPFYTAANLVVYGAFFAIYPFHFVYELGMNYDQMWDAFKSFWRVIKDYKKSTYDGFDDPHSTMMRAYPEVPEWAYLIIVVISLVLAILCVKVYPAETPVWGIFFALGINFVFLIPLTTIYARTGFAFGLNVLVELIVGYAIPGNGLALAFIKALGYNIDGQAQNFVNDLKQGHYAKLPPRAVYRVQLLSIFISSFIQLGILNFQINGGIKDYCEPGNTQKFTCPSSRTFYSASVLWGVIGPKRVFNGLYPILRWCFLIGFLIAFPCIAIKKWGPRKYVKYFEPSIIIGGFLNYAPYNLSYYIPGLYVSFTFMSYIKRKYEAWWQKYTYVLSTGLNAGIAFSSIIIFFAVMYHEKDINWWGNTVMYSGVDYAMTGWLNATVDAPDGYFGPRVGHFP

SEQ ID NO: 166 - protein, 366 aa, Candida albicans
MNYDQMWDACTSFWRVIKDFRKSTYDGFDDPHSTMMRAYPEVPEWAYLIIVVISLVLAILCVKLYPAQTPVWGIFFALGINFVFLIPLTTIYARTGFAFGLNVLVELIVGYAIPGNGLALAFIKALGYNIDAQAQNFVNDLKQGHYAKLPPRAVYRVQLLSIFVSSFIQLGILNFQINGIKDYCKPGNTQKFTCPGGRTFFSASVLWGVIGPKKVFNGLYPVLAWCFLIGFLLAFPCIAIKKYAPRKYVKYFEPSIVIGGFLKYAPYNLSYYIPGVYVSYAFMSYIKRKYEAWWQKYTYVLSTGLNAGIAFSSIIIFFAVMYHEKDINWWGNTVMYSGVDYAMTGWLNATVDAPDGYFGPRRGNFP

SEQ ID NO: 167 - protein, 921 aa, Candida albicans
MSTEKPIPALPVTSITSHVDVAAHEVNLQAITSNPLSIGEVGTTLTNGQKDFILKRLHYDSLVSFDKLPPQATFIFEKIEHISIEEALAILEKAVVEHENDVNILDNDEELWTKLINYKQGKIPSDTDFSEKAHPSNFTAKDKLSAFIHEKRVSEETSSLDNSASENLNEPYYKIVDWELQVKLEAVLIAYWSPYPQVRGVTDPYDDPTIPVETVRVYIVAIIWTAIGAVINQFFSERQPSIGLGMSVVQVFLYPTGLICEWILPKWKFKVWKYTIDLNPGPYTFKEQMLATIFCGVSSGTSYVSSNILMQKSELFYDNKWVDFGYQVLLTLSTNFLGFGLSGIMRQFAVYPEKAIWPSILPNVRLNKTLMSPEVKARINGWSISGYNFFFITAGISFLYFWIPDYLFQALSQFNWMTWIKPDNYNLAVVTGSFGGLGLNPIPSFDMNVIGTGGFIAPFYNTLESYIGMVLALFCILGVFYSNYKWTGFLPINSNRLFTNEGKPYHVTAVVNSNSLFDEEKYKEVGPPFYSAGNLVLYGAFFAIYPFHFVYEIAMNYKQMWEALQSLYKGIRNFKRSTYEGFDDPHSVMMRAYPEVPEWAYLIILVISLVLAILCVKLYPAETPVWGIFFALAINFVFLIPLTTVQSRTMFGFGLNVLVELIVGYAIPGNGLALAFIKALGYNIDGQAQNFINDLKQGHYAKLPPRAMYRCQLLSVFITSFIQLGILNYQITGIKDYCVPGNKQKFTCPGTTTFYNASVLWGVIGPKKVFNGLYPILAWCFLIGFLLAFPCIAFKKWAPRKYSKYFEPSIIIGGFLGYAPYNLSYNTGGLYVGYAFMHYVKRKYEAWWQKYDYLLATGIDAGIAFSSIIIFFAVMYHEKDISWWGNNVPFEGWDASMTNGYLNATLQAPDGYFGPRVGHFP

SEQ ID NO: 168 - protein, 945 aa, Candida albicans
MTKKGHEYIQLSTFSEHENEHEPESSSTTSSPPPPGIRQYEKQHEWNFTDLQLQFVLLRLGVISDEVYHNQNFSLSDPDIHISKEVEYMINKIDQLSISEAIEIIRDALADHNGDVNFLIEDYQLLERLISQIPNNIESQENNQNVETNLDELPEMKYPMQSTFKNKTYLTIIDWSLQIRLEAALIHYHSPYPEIRAITDPFDDPNTPVETFRAYFIALFWTFIGSLINSFFYHRMPGISLGTHTIQILLLPSGKLWEKLIPLNKTITINNTKINLNPGPWNFKEMMLSTIIYSCSASTPYSINNIFVMKLDRFYGLKWVNWIFQILFTVSTQLLGFSFAMIMKKVCVYPSKAIWPTILPTIALNRALMNQDNASNNSIVHGWKISPYSFFLVTFTLSFIYNWIPSYFFKALSLFNWPTWFNPNSIHLVNITGSNVGLGFNPIPSFDWNVIGGSSMVIPFYTFVNRYLGTFLGFIIILIVYYTNNNWTAYLPINSNRLFNNKAQLYNVHDILNDDNKLFDNEKYQQIGPPYFSAANLVIYGAYFCLYPFAILYHGLTEWNSMKTSFINVWTSIVDAFKSESEMGVSVESNDDNNLSLHRQYGRYANDPHCKMMAHYPDVPDWWFITILVVSTSFAIAAVWFYPVETPIWGIFFTIAINFIFLIPLTSIASVTGFSFGLNVLVELIVGYAIPNSGIALITLKAYGYNIDSQASNYITDQKLAHYAKIPPRAIFKGQLLSTLLNIIISLSVANWQLNNVENICDPHQKDNFKCPGANTYFYSSIQYGEIGPAKVFGGLYPILKWCFLLGVLLVFPCVWLKRNGPTKIFQRYFQPTIIIGGMLDFAPYNLSYFTGGLYISYIFMFYIKKNYLLWWEKYNYILTSALSAGVAFSALIIFFTVQYHPHPLHWWGNSIGQQGIEGGEISPIWKNIDTAPDGYIGLRKGHFP

SEQ ID NO: 169 - protein, 747 aa, Candida albicans
MSKEAEFVKTISKEGDPQVDVLERDAESNSENALEPDVEELPKVVREIVPLEDDPTIPVLTFRYFILSIIFIIPGAFIDTMNSFRTTSAAYSIFFVQIASHWCGKWLARILPKKQVGFGRLSFNLNPGPWSIKETALITITANSGATGSMGTNPLALAELFYGETVNPAVAIFFMWMIVFIGYSFAGIARNFLLYDPQFTWPQALMQTTLFQTQSKSDKDAKQASKQMKVFFFVLIGLCIWQFFPEYIFPMTSSLAFLCWVAPENYTANFIGSGLGGMGFLNLSLDWSNITSSIMLYPYWVQVVQFAAFVLGAWILIPAAKWGDLSSYPYGLMSNSLFLGNGTKYPTTELLTPNLRLNETRYEELGPVHLGAQRAWNMFFDYAAYVSGFMWVVAFGYKSLSGSLKRLVKSRKQKGSINLQYTDRLNKLQAAYEEVPLYWYAILFLCAFVTLLVIFATNSLFMPWWCLLVGVAFGAVIVTPLVWLYALSNFQLPIGTFNELLYGYMIQNKTSRHPAGAMVYGAVGGDLFYRAQYILNDQKIAHYMHISQRAVFFSQIFGELIGVPINYAALRWVISSKRDFLDGTKVDKLHQWTGQTIVSYNTNAVQYVILGPDRLFKNYPVLPYGFLLGAGAPLVLYLLHRLFPKSKLKFHLWNTTVFFSTMSTFYGNLSTGYFSRFIGGTITMFWAFRYKHSLWKKYNYLLAAALDTGLNLSILLIFLFFSAGKTVNFPEWWGNNGKSVERCFAMS

SEQ ID NO: 170 - protein, 718 aa, Candida albicans
MTIETISNNEGIRQRSASESTHTHTYLDQLDIPQITLRSTIVGLLIGSLVLISNFQFGLQTGWVSMMSLPAALLAFSIFKLLPISIAKNFTDVENVFVQSIAVAVGTGPLCYGFIGIIPAMEKFMTSEESGLGRPLTFGLGQLMIWSLGLGLFGVFFAIPLRKQVIVKEKLPFPSGSATATLISVLHGSDIYQDKEEISEKLDIEEEEGRETGSIATESESLTQQSSKSQLITTTNIQDDYDSNMRSLIITFIISATYTILSFFLPILKKIPIFGNHLSVNYLWNFQPSPAYIGQGIIMGLPTVSYMLFGAILGWGILAPLAKHMEWAPGRIDDWINGGQGWILWISLTVMISDSLVSFVVVSIKSINNALDNFRQRRDLDQFLELQQSQQSEYLLQDQEETRSSTSSNENPENSTYDGKRTQEDCKYTMEVPERHLVSTKTTVIGIAVSTLLCIISLKLVFGNIVPIYASLAAIILAMFFSILGVRALGETDLNPVSGIGKLSQLIFALIIPSNHPAKILINLVAGGVAEAGAQQAGDLMQDLKTGHLIGASPKAQFIAQILGTLYSVGLSSIMYKVYNSVYKIPSDMFRIPTAVVWIDCSRLVTGQGLPPHIREFALVLGVIFGIISLLKNTVPPTSSYHKYLVYLPSGVAVGVGIYNTPNFTLARFIGGLICYNWQNIGPNGKIGMIIFSSGLVLGEGLFSGFTMLLTSLGVKHW

SEQ ID NO: 171 - DNA, 2160 bp, Saccharomyces cerevisiae
atggacaaattagtcgtgaattattatgaatacaagcaccctataattaataaagacctggccattggagcccatggaggcaaaaaatttcccaccttgggtgcttggtatgatgtaattaatgagtacgaatttcagacgcgttgccctattattttaaagaattcgcataggaacaaacattttacatttgcctgtcatttgaaaaactgtccatttaaagtcttgctaagctatgctggcaatgctgcatcctcagaaacctcatctccttctgcaaataataataccaaccctccgggtactcctgatcatattcatcatcatagcaacaacatgaacaacgaggacaatgataataacaatggcagtaataataaggttagcaatgacagtaaacttgacttcgttactgatgatcttgaataccatctggcgaacactcatccggacgacaccaatgacaaagtggagtcgagaagcaatgaggtgaatgggaacaatgacgatgatgctgatgccaacaacatttttaaacagcaaggtgttactatcaagaacgacactgaagatgattcgataaataaggcctctattgaccggggattggacgacgagagcggtcctactcatggtaatgacagcggtaaccaccgtcacaacgaggaggatgacgtccatacccaaatgacgaaaaactattctgacgtagtgaacgatgaagacatcaacgttgccattgccaatgccgtcgcaaatgtagattctcaatcaaacaataagcacgatggaaaagacgatgatgccactaacaacaatgatggccaagataataatactaataacgatcacaacaataacagcaatatcaataacaacaatgtcggtagccacggcatttcctcccactcaccatcctccatacgagacacgtctatgaatttagacgtcttcaattctgctaccgatgatataccgggcccatttgtcgttaccaaaattgagccctatcatagtcacccactagaagataacttgtcactgggtaaatttatcctaactaagattccaaagattttacaaaacgatttaaagtttgatcaaatactagaaagctcttacaataattctaaccatacagtgagtaaatttaaagtttctcattacgtggaggagtccggtcttttagacattttaatgcaaagatatggattaaccgccgaagatttcgaaaaaaggttactttcccaaatagccagacgtataacgacgtataaagcaagatttgttttgaaaaagaaaaaaatgggcgagtataatgatttacaaccttcttcatcttccaataacaacaataacaacgatggtgagctttctggcacgaacttgagaagtaactctatcgactacgccaaacatcaggaaatatcaagtgcgggtacctcatcgaacacaaccaaaaatgtgaataataacaagaatgacagtaatgacgataataacggcaacaataataatgacgcctcaaatttaatggaaagtgtgctagataaaacctctagtcaccggtatcaacccaagaagatgccaagcgtcaataaatggagcaagccagatcaaataactcattcagacgtgtccatggttggcctagatgaatcaaacgatggcggtaatgaaaatgtccacccaaccttggctgaagtagacgctcaagaagctcgtgaaactgctcagttagccatagacaagatcaattcttataagaggtccattgatgacaagaatggtgatggccataacaattcgtcgagaaacgtggtagatgaaaacttgatcaacgatatggattcagaagatgctcacaagtccaaaagacagcatttgtcagatatcacactggaagagagaaatgaagacgacaaactaccacatgaagtggcggaacagttaaggttactgtcatcgcatttgaaagaggtagagaatctacaccagaataatgatgatgacgtagacgatgtaatggtggacgtggatgtagaatcgcagtataataagaacacaactcatcataataaccatcatagccaacctcatcacgatgaagaagatgttgctggactaatagggaaagccgatgatgaagaagacctttct

SEQ ID NO: 172 - DNA, 2313 bp, Saccharomyces cerevisiae
atggataacgttgtagatccgtggtatataaatccctcaggcttcgcgaaagacactcaagatgaggagtatgttcaacatcatgataatgtcaatcctaccatacccccacccgacaattatattttgaataatgaaaacgatgatggcctcgataacttgttaggtatggactactataacatcgatgacctgttgactcaagagttaagagatctggatattcctttagtgccttctcctaagacgggcgatggttcttctgataaaaagaatattgatagaacttggaaccttggtgatgaaaacaacaaagtctcccactatagcaaaaaatcaatgtcctcacacaagagaggtctaagtggcacagcgatatttggatttctcggccataataagacattgagtatttccagtttacagcaatccattctaaatatgtctaaagatccgcaacccatggaactcataaatgaattgggtaatcataatacggtaaaaaataacaatgatgactttgaccatataagggaaaatgatggtgaaaatagctatttgagccaagttttgttgaaacagcaggaggagttaagaattgctcttgaaaaacaaaaggaagtgaacgaaaaattggagaagcagttgagagacaatcaaatacagcaagaaaagttgcgtaaagtattagaagagcaagaagaggtggcgcagaagttggtttctggggctacaaattctaattccaaacctggatctccagtaatactaaagacacctgccatgcaaaacggtagaatgaaagataatgctataatcgtcacaacgaactctgcaaatggcggatatcaatttcctcctccgacgttaatatcgcctcggatgtcaaatacttcaataaatggttcaccatccaggaaataccataggcaacgatatccaaataaaagcccagaaagtaatggattgaaccttttttcctctaacagtggttatttgagagattctgaactgctttcattttctccacaaaattataatttaaacttggacggcttgacttataatgaccataataacaccagtgataaaaacaataatgataaaaaaaatagtactggtgataacatattccgtctgttcgaaaagacttccccgggtgggctaagtatctctccaaggataaatggaaatagtttgagatcgcccttcctcgtcggcacagataaaagcagggatgatcgatatgctgctggcacgttcacgcctagaacacagttgtcacctatccacaagaaaagggaatccgtagtttccacggtctcgacaatatcacaactgcaggatgacactgaacccatccacatgcgaaatacccagaacccaacattaagaaatgcaaacgctttagcgtcatcaagtgtactacctcctattcctggttccagcaataacactccaattaagaattctttgccacaaaaacatgtatttcaacatactcccgtcaaagctccaccaaagaacggaagtaacctagctccgcttctaaatgcaccggatttaacagatcatcagttagaaattaagacacccatacgaaataacagtcactgtgaagtggaaagctatccgcaagtaccacctgtcacacatgatattcacaaaagccccactttgcatagtacgtctcctttaccagatgaaataatacctaggactacgccaatgaaaataaccaagaaaccaactactctgcctccgggtaccattgaccagtacgtcaaggaactacccgacaaactattcgagtgcttataccctaactgtaacaaagtattcaagcgtagatacaacataaggtcgcatattcagacacatttgcaagatagaccgtattcatgcgactttcccggttgcaccaaggcgtttgttcgcaatcatgatttaataagacacaaaatctcccataatgccaagaaatacatctgcccatgcggaaagagatttaatagggaggatgctctaatggtgcatagaagtcggatgatttgcaccggcggtaagaaattagaacattcgatcaacaagaaacttacatctcccaaaaaaagcctgcttgacagcccgcatgacacaagtcccgtaaaagaaactatcgcccgggataaagatgggagcgtcctaatgaaaatggaggaacagctgcgagatgatatgcgcaaacatggattactggatccacccccatccacagcagcgcacgagcaaaactcgaaccgcaccctttcaaacgaaactgatgctctctga

SEQ ID NO: 173 - DNA, 429 bp, Saccharomyces cerevisiae
atggcagatcaagtaccagttacaacacaactaccaccaataaaacctgaacatgaggtaccacttgatgctggagggagtccagtaggtaacatgggtaccaactcgaataacaacaacgagctaggtgatgtattcgacagaataaagacacacttccctccggccaaggtaaagaaaataatgcagacagacgaggatataggaaaagtttcacaagccacgcccgtaatagcgggcaggtccctagagttttttatagcgttattggtgaaaaaaagcggggagatggcaagaggacaaggaaccaagagaataaccgccgaaatactaaaaaaaacaattttaaacgacgaaaaattcgatttcttaagggaaggtctatgcgtagaagaaggccaaacacaaccggaggaagagagtgcctga

SEQ ID NO: 174 - DNA, 450 bp, Saccharomyces cerevisiae
atgaatctacagaacaacgttttaaatcagatacaccagattctgctgcctacgaatcctactctcgataaacctaatgctgaggctacaaaggaagaattttcgtctgcagaaaatagagatgaaaaagactatcttaccaaccagcagccgaaaaatctgagtactccctccaccagttccaacggtgaatttataccgcatattttttattcgctgcaccaaataaggaaggatccaaacaatctctcaaatcaattggaaaccttaacaggttcgattagacatcgtttgaaactttgtaaatctttgatatcggaaaacgaagataccaaggatttattaagtaaaagtccatcagaatggcaggatatcatccatcaacgtgaacaagaactgcaaattaagagagacgtcttggatgatctttatcgcaagttacaacgataa

SEQ ID NO: 175 - DNA, 3246 bp, Saccharomyces cerevisiae
atgtctgctgctcctgtccaagacaaagacactctgtccaatgccgagcgtgcgaagaacgtcaacgggttgcttcaggtgctcatggacattaacactctgaacggagggagctccgacactgctgataagataagaattcatgccaaaaacttcgaggcagctttgttcgcaaagagctcttcaaagaaagaatacatggacagcatgaacgaaaaagttgctgtcatgcgcaacacgtacaatacgaggaaaaacgccgttactgctgctgccgctaataacaacattaaacccgtggaacagcaccatattaacaacttgaaaaattctggcaacagcgccaataatatgaatgtcaatatgaatctaaacccacagatgttcttgaatcagcaggctcaggcaaggcaacaggttgcgcaacaattaagaaatcaacaacaacaacaacaacagcagcagcagcaacagaggcgtcaattgactcctcaacaacaacaattagtgaaccagatgaaagtggcacctattcccaaacaattactgcaaagaattcctaacattccacccaatatcaacacctggcagcaggtcactgctttggctcaacaaaagctattgacacctcaggatatggaagctgcgaaggaagtctacaagattcaccagcagttgctattcaaagcaaggctacagcaacaacaagcacaggctcaagcacaagctaataacaacaacaacggcctcccccaaaatggtaatattaacaataacataaatattcctcaacagcagcaaatgcaacctcccaattcaagtgcgaacaacaaccctttgcaacagcaatcatcacaaaataccgtaccaaacgtcctcaaccaaattaaccaaatcttttctccagaggagcaacgcagcttattacaagaagccatcgaaacctgcaagaattttgaaaaaacacaattgggtagtacgatgacggaacctgtcaagcaaagttttattaggaaatacattaaccaaaaggccctgagaaaaatccaagctttgagagatgttaagaacaacaataacgctaacaacaacggctcgaaccttcagagagcccaaaatgtccctatgaatatcatccaacaacaacaacaacagaacacgaacaataatgacaccattgccacttctgctacacctaatgctgccgctttctctcagcaacagaacgcaagttctaaattatatcagatgcaacaacagcaacaagctcaagctcaagctcaagctcaagctcaggcacaggctcaagcacaagctcaagcacaggcggcacaagcggcgcaagcgcaagcacaagcacaagcacaagcacaagcacaggcacaggcacaggcacaagcccaggcgcaggcccaagcccaagcccaagcacaagcacaagcacacgctcagcaccagccctcccaacaaccacaacaagctcagcaacaacctaacccactacatgggttgacacctactgcaaaggatgtcgaagtaattaagcaattgtccttggatgcttctaagaccaacctaaggcttacggacgtaacaaattctttatccaatgaagaaaaggaaaaaattaaaatgaagttaaagcaaggtcaaaagctttttgttcaggtgagtaatttcgccccacaagtctacatcatcacaaagaatgaaaacttcttgaaggaagtttttcagttaagaatctttgtaaaagagatcctagaaaaatgtgccgagggtatatttgttgttaaattagacaccgttgacaggttaattattaagtatcaaaaatattgggaaagtatgagaattcaaattttaagaagacaagctattttaagacaacaacagcaaatggcaaacaacaatgggaacccaggcactacttctactggaaacaataataatattgcaactcagcaaaatatgcaacagtcactacagcaaatgcagcatttacagcaattgaaaatgcagcagcaacaacaacagcagcaacaacaacagcagcaacaacaacagcagcaacaacaacagcaacagcacatatatccctcctcgactcctggtgtggctaattattcggcaatggctaatgcacccggtaacaatatcccatatatgaaccataaaaatacctctagcatggattttttgaactctatggaaaatacaccaaaagttcccgtatccgctgcggcaaccccatcactgaacaagacgatcaacggtaaggtgaatggcaggacaaaatctaatacgatacctgttaccagcattccatcaacaaataagaaactatcaatttcaaatgccgctagtcaacaacccactcctaggtctgcatcaaataccgctaagtcaaccccaaatacaaatccttctccactgaaaacccaaactaaaaatggcacaccaaaccccaataatatgaagactgtacagtctcctatgggtgcacaaccatcatataatagtgccattatagagaatgcattcagaaaggaagaactcttgttaaaagatttggaaatcaggaagttggagatatcttctcgttttaaacatcgccaagaaattttcaaagattctcctatggatttgtttatgagtacgctgggtgattgcttaggtatcaaagatgaagagatgcttacgtcatgcactatcccaaaggctgtggttgatcacatcaacggctctggcaaaaggaagcctacaaaagcggctcaaagggctcgcgatcaagattccattgacatttccataaaagacaacaaattggttatgaagagtaaattcaataagagcaataggtcgtattcgatagcgttgtccaatgtagctgctatattcaagggtatcggtggtaactttaaagacttgtccactttggttcattcatcatcgccgtccacatcttctaatatggatgtcggcaacccaagaaaaagaaaagccagcgtattagaaataagcccgcaagattcgatagcctcggtgctatcaccagattcaaatataatgagtgattctaaaaaaattaaagtagattctcctgatgacccattcatgacaaaatcaggagccacaactagtgaaaaacaagaagtaacaaatgaagctccatttttaacttctgggactagttcagaacaattcaatgtatgggattggaataattggacaagtgctacttga

SEQ ID NO: 176 - DNA, 1320 bp, Saccharomyces cerevisiae
atggtcacaaaacatcagattgaagaggatcacttggatggagctacgacggatcccgaagttaaacgggtaaaattagaaaacaacgttgaagaaatacaacctgagcaggctgagaccaataaacaagagggcaccgataaagagaataaaggaaagttcgagaaagaaactgagagaataggaggatctgaagtggttacagatgtggaaaaaggaattgtcaaatttgaatttgatggtgttgaatacacattcaaagagagacccagtgtcgtagaggaaaatgaaggtaaaattgagtttagggtggtgaataatgataatactaaagaaaacatgatggtcctaactggattaaaaaacatttttcaaaagcaattaccaaaaatgcccaaagaatacattgccaggttagtctatgatcgaagtcatctttccatggctgtcattaggaagccattgactgtcgtaggtggcataacatatcgacctttcgataagagagaattcgcagaaattgttttctgtgccatcagttcgacggaacaggtacgcggttatggtgcgcatctaatgaatcacttaaaagactatgttagaaatacctcgaacataaaatattttttgacatatgcagataattacgctattggatactttaaaaagcaaggcttcactaaagaaatcacgttggataaaagtatatggatgggatatattaaagattatgaaggtggtacgctgatgcaatgttctatgttaccaagaatacgatatttggacgcaggtaagattctattattacaagaagcggccctgcgaagaaaaataagaacgatttcgaaatcgcatattgtaaggcctggtttagagcaattcaaagacttaaacaatatcaaaccgattgatccaatgactattcctggcttgaaagaagccggctggactcccgagatggatgcgttggcacaacgtcccaagcgtggtccacacgatgcagcaatacagaatatactcacagagctacaaaatcatgcagcagcttggcccttcttacaacccgttaataaagaggaggtccccgactattatgattttatcaaagagccaatggacttgagcaccatggaaataaaattagagagcaacaaatatcagaagatggaagacttcatatatgatgccagattggtgtttaacaattgccgaatgtacaatggcgagaatacgtcgtattacaagtatgctaataggctagagaaattcttcaataataaagtaaaagaaatacctgaatattctcaccttattgattaa

SEQ ID NO: 177 - DNA, 3109 bp, Saccharomyces cerevisiae
atggtatggtatgatcataacacgcattctgaaaatgttatctgggaggttttcgatgggtatggagttttccttgattctcacttattatcccttgtattgtaattgatccttcagtaatatttgcagcctttcacaactatcctttttttcattgcttattactattgaaccttttttaggagttgcctgcttatgcaatataatttgctgacaagtagtaaattaccagcacaatattaagattaaaaaagaaattagccaagagcttgatatattatcttatacacaaacctttccgacctacttgataaagccacatacctctacctcttctattagaaatagaaaagtacaaaaatagcaaaaggaaataatttctttaaaataacattgtgtgaggttccaactatggattattaatagagtaacgcaaacttaaggaaaggaagtgctttacaattaagtatttataagaacgaatttatcccccaaaaaaaagcacctatacttaataaaaggaggggaatagctatcaattgagtgttgtctgcgtctgtctgcgtacaagaggatgaattttctgactcaggctatgtcagaaacttttcaagggacaaataacaggataaaacgtaatgtcaggacacaaagtgtgccatcaacttcctataataatggcaaagaatcatatggaccaaatactaaccaattaaatgccctactttctcaattggaacagcaaacaagtgttgatagtaccagcacgagctcaaacttttattccattgcacaatatattttacaatcatacttcaaggtcaatgtagattctctaaactctctgaaattggtggatttgatagtggaccaaacttaccctgattctttgacgctgcgaaagctgaatgaaggagcaacgggacaaccatacgattatttcaatacagtttctcgtgatgctgatatctccaagtgtccaatttttgcgttgaccatattttttgttatacgatggagccacccaaaccctccaatttcaattgagaattttactacagtaccgttgctagattcaaactttatttctctaaattccaatcctttactatatattcaaaatcaaaacccaaacagcaattcaagtgttaaagtttcaaggtcacaaacgtttgaaccttctaaagagttgatcgatttggtatttccatggctgtcttatttgaagcaggatatgcttcttattgataggacgaattacaagctttattctctctgtgaactatttgaatttatgggcagggttgccattcaggatctccgatatctgagtcaacatcccttattactacccaatatcgtaacattcatttcaaaatttattcctgagttattccaaaacgaagagtttaaaggaatcggttcaattaaaaattcaaacaataatgccctgaacaatgttacaggaatagaaacccaatttttaaatccatctaccgaggaagtgagtcaaaaagttgattcttactttatggaattatcaaaaaaattaactacagaaaatatcaggttaagtcaagaaataacacaactaaaagcagatatgaactccgtaggcaatgtttgtaaccaaattttgctgttgcagagacaattgctttcaggaaatcaggcgatcggatcaaagtccgaaaatattgtgtcttccacaggtggggggatattaatactagataaaaatagcatcaattcgaacgtactgagtaatttggttcagtcgatagatcctaatcactccaagcccaacggacaagcccaaacacatcaaaggggtccgaaaggacaatcacatgcacaggttcaaagtactaatagccctgcgctagcgccaattaacatgttcccgagcttaagtaattctatacagccgatgcttggcaccttggctccgcaaccgcaagatatagtacagaagaggaagctaccgttaccaggttcaatagcctctgcagcaacaggcagtcctttttctccatcacccgttggtgagtctccctatagcaaacgctttaaactagacgataaaccaactccgtctcagacggctcttgattccttacttacaaaatccatttcaagccctagattacccctttcgacgttggctaacacagctgtcacggaatcttttcgctcacctcagcagtttcagcattctccagattttgtagttggtggtagctcaagttcaacaacggaaaataactctaagaaggtaaatgaagattctccatcatcttcttcaaaactagctgaacgacctcgtcttccaaacaacgactccactactagcatgcctgaaagtcccaccgaggtagctggtgatgatgttgatagggagaaaccgccagagtcaagtaagtcggagcccaatgataacagcccagaatcgaaagatcctgagaaaaatggtaaaaacagtaatccgcttggtacggatgctgacaaaccagtaccaatttctaatattcataattctactgaggctgcaaattcaagtggtacagtgacaaagacagctccatcatttccgcagagttcttctaagtttgaaattataaataaaaaggatacgaaggcggggccaaacgaggcaatcaaatacaagctgtccagagaaaataaaacaatatgggacctatatgcggagtggtatattggtctgaacggtaaatcttcaataaaaaaattgattgaaaattatggctggcgaaggtggaaggttagcgaagattcacatttttttcctactagaagaattattatggattatattgaaacggaatgtgatcgtggcataaaactcggcaggtttactaatcctcaacaaccgagggaggatatacggaagattttagtaggggacctagaaaagttcaggataaataacggtctgactctgaattctctatcattgtactttagaaatttaacgaaaaataacaaggaaatttgtatttttgaaaactttaaaaattggaacgttagatcaatgacagaagaagagaaattaaagtattgcaaaaggcgacataatacaccatcttaa

SEQ ID NO: 178 - DNA, 4947 bp, Saccharomyces cerevisiae
atgtctatgttcaatgccctcaattcaaacatcgaaggtgaacaatatgaagcagaggagcattcaagagagcttcaaatagaacagagttttaatattttgcaggacgctctgattgatctaaaaaacaaggacttcgaaaagtcggacagcaaattccaagagctcttccagattgatgtcgtcaagcctgataggtggggcatgtatcgcaattcttctcctacgctagataacctgcgatatctatgttataggaacagagggatgtactatcatctgtatttggagaataactatgaaaggttgaactcacaagaactagttaattgtattttaaaagcagttgagaacttggttgagtctattcaacatagcgatgctgattttgcagttacagatttgctggctcgcatcttcaagagctttaatagtgtcaagttggaacgtttaatatcagaatatgaattcactaagcaggaaaatctttcacttttgttggggcgacatcgtaaatttcttttgaacgatttgactctgatgatgaataactacgtagaactcacgaacaaactattagtccccaacttatcggataacacaatctttgagagatatcatttggagaagtacaaagatattaagccggaaccactagcttttggtccaattctttctagaatatcagaaatgaaaaagcaagatgaggaaataatgaaaaagctggacgtgtttaatgtcactttgaatgaagaatcatgggatgaagttgcgaaggctttgaaaaacttactacccagcgttaaaacatcgtctcttattggaaggaatatggatccgtataacgaaattgaagaacctattgaagcggttaagtttgaactatcggaagcaattaataatacaccatctttagatagagagtctgagcgacaagaagaagagcaagataatgagagtgtacgagcagatgataagagtgggaatttagctccatcggatatccaaactaatgaagaagcaaggcctaacaagagaactgatgaacatatcgatagcacgaagcctcttcaaagaagtagtaaacgctttaaagaaagagaacaagaaaactcaaaagagcttgttatggacgttcataaaagattttttggtgagttcaacacgttgttgtcatatattcacattctacccttttgcgattttgacacatttgcttccaaatttatcattggctctagtgacaaacaacccgaaaaatttattccctatactgatctctatgaatgtttgaaatcttggagtagtagatatactgatatttttaaccaaaatgactacttgtccagtggttctaacgaaaatgaggaattattccaactaaatgcgctcctgaaatctaatgcatttgatgataaggagagctttcctagatatttaaatgatttggactcggatcacatcagatcttttatttccgaagtgaatgcaggcaatcttcacttccatcaagtgcgtttgaaattattattcaaattgcttggaacttacgatgaaggaaacggaaggcgtctcattatagactacctttgggagtctcagcttctaaaaattgttttatggtttgtatttggaatcgaatcgaacatttttgcacttattaacaaaaacaaaaggcaatgcaaatatttggctttatcgatttacgaacttcttgttaaccatttagggaatattgtggaggaaatcacaaataaacggattcaaggacataagtcagcagacctaaaaagtcaaagaaataaagtcgagaaaagaataaggtcgtggcatactctgttagaacaaattgctgacgaaaaagataaagaactgtatgtacattttcaatggacgcattactgcttcttgcaatatacatgtgatatagtcgatagcagactctctgaaactttgacgtctttagaaaatactataaaggattcagattcttctttagacattgcctatccgaattaccgtcatataccggcactaaacctaaacacagttcaatcccagaaaaggaaaataagaataatacaaaacataacagtcgaagatatatctgaagacacgaactctgacactcattcagaaaatcatctagagacactagaaaaagtccttttacatatattacacccttcgactaatcattcaaatattgatgaggagatggtttcctttattttcaactcaccatttttattgaaaattagactttggggcgttctcttttcgtcatatgtcaaaaaatccagtatacaggatgttcaaagaatttatttccacgtacttgattttatgaagggcgcattgacgtcacctgtctacaaagaatcgaacccacacggaaggcaccaaatgttattaacagtgttgacagcaattggctatctctcaagccaactgacagcgatactaaattcaaataggtgggaaagcagcgattttgtcttggaggactatatgtttgaaaagctgctgcaaacattcttcttcttttatactgtccttttctatgaaagctctgcggttaacgacgtttctaataagtcttttttcaaaagagcatcgaaatcatcagggaaaatgaaggatataatgatagatttagcgacgttgatactttattattatgatttacaagcaaagctcaggacacctgctgaacaaggtattgaaacaacggaactaatttggtccttacacactctttttggacatttccatttttgtgatgcatcaaatggaaagttcctagatttagctgaaaaactattgtgccagttcattaataatgattcttttttacaattgaagcaaatactgtggtgtagatatcactacgcgatagctagtgataacttcagtcctgatctgcatgatacaaaagcggtagagatggaaaagatacactctttgcctttaggtacatatctaatcaaattacagtatcaaaataagaacccttacctgtcgtcgtcaaagaccaccctaaaacagataatggataatattatagaaaaaattggcgacccatcaacgctggacaatcatatcatatctagaaactcatttctattaaatgaatatttatcaaggccaataacggcagacttgttgaagcatacattttctggtgcaacaagtttgtatttaacttctccaaacgacgagttacagcaaggcatgacagccggcttgttctacgtatccagcttacagtccctgggtttgtataaaatgagaaagaagtctatgcaagcaagaccttctgaattagactccattatcagaatgttaaagaatgacattatatacaacacaaaccgtttcgaaagttggatattactcggaaagtgttacagttatattgttgaagatgatttaatatggacctcagataagatcactgtccctgagaaaaaagatgttattgctttgactcaaagaaaggcaatattgtgttatttaatggccatttccatttattatagtaagttggatcgaactattgacgataaaaagattatattggaggcattggatgacttaggatctatgctgattagcggctactataatcccatgaataagctttgttttagctggaaaagcagtgctgagaatacaatgagattgtctgaaaccggtgaagtagtaatggaaaaaactaagaaaatcaccacaatctcagactttaacatcgagcaaagtatatttttatgttttaatagggcttgttctttatccggcgatatcaagtcacaggacgatgtattcgtgttgaattggtctagtttttacaatctggccaagttctttttcaaaacagatggtggtaataattgtaaattagttgccaaatatattactcagggttgccaaatagcttatgagtcatcacctgctaaagatccgatcatagaaccccattatctgttagttaatgcttgttacaagtgggtaaaaagaggcgtcataggtgttaacgaagctctgaccttactgtctaaagataaccaattcttccaggaacaagaggaattttgggtcaacgacgaaggtcttgcatgggattatcaagaaaaattcttttttgacaaaatcataagactacttcgccatttactatctgttgataaaaaaaaatggcagcacagacctcgttacagaatagcgcgcatattgtttgacgatttgggtgatgtgaacggtgctttggaggagatggatagcttaatatccgcaaaaagtataaacaaaaacttggtcaatatatggaaaccagattttgaaaggccagggaaacatttcatctatacttaccagtacctggttttgtatttggatttactcttcgcaataaaagacttcaatacaacaggtcttgttataaaaaagctaaggcgatttggttctggaactgtgaacgtaaacgaactattagagcgtgccattaatgtgtacacgcaaagtgccaaaatcaagctgcaattgcaagacaagagctacgtggagcaaatccttccaaccttgaactaccaagaattcctgaagattagtgagcaactgaaccaagttttcgaccaaggaaagtaccctgaagaaatatcatccgggttaaaacttgctttccagttgaaaaagggacatagcggaattgcatttgacagcgtttgcttgggcatttatttcgagtatctctattttcctctagctcgacaggatcaatccctcacagacgtgaacgatgaaaacaatccagcactaccgtcatcaggttctgtgacatcaaaaagcactccagaccctacttctaagccaagtgcaattaagaaacgtgttacaaagaaggaagtcttcgatagagtgaggctattagtggataagatcacgtga

SEQ ID NO: 179 - DNA, 2502 bp, Saccharomyces cerevisiae
atgaataatgctgcaaatacagggacgaccaatgagtcaaacgtgagcgatgctccccgtattgagcctttaccaagcttgaatgatgatgacattgaaaaaatcttacaaccgaacgatatctttacgaccgatcgtaccgatgcaagtactacatcttccacagccattgaagatattattaacccctcattggatccgcagtcagcagcatcgccggttccttcttcctcttttttccatgactcaaggaaaccttccaccagtacacatttagtaaggagaggtactccattgggaatttaccaaaccaatctatacggtcacaatagcagagaaaatactaatcctaatagtacattattatcttctaagttactcgcgcatccaccagttccttatgggcaaaatcccgatttactacaacatgctgtgtacagggcacagccgtcaagtggaaccactaacgcgcaaccgcgccaaaccacaagaagatatcaatcccataaatcacggcctgcatttgttaataaactatggagcatgttaaacgatgattctaatacgaaacttatacagtgggcggaggatggaaaatcttttattgtcacgaatagggaggaatttgtgcaccaaattttaccaaaatattttaaacattccaatttcgcttcctttgtaagacaattgaacatgtatggatggcataaagttcaagatgtcaagtcaggatcaattcaaagtagttcagatgataagtggcaatttgaaaatgaaaacttcattagaggtagagaagatttgctggaaaaaataatcaggcagaaaggttcctccaataaccataatagccctagtggtaacggtaatccagcgaatggtagcaacatccctctggacaatgccgcaggaagtaataatagcaataataacatcagtagtagtaattcattttttaacaatggtcatttattgcagggtaaaacactaagattaatgaacgaagcgaatcttggagataagaatgatgtcaccgcgattttgggggaattagagcaaataaaatataaccagattgcaatttccaaagatttactaagaataaacaaagataatgagttattatggcaagagaatatgatggccagggaaagacatagaacccaacagcaagccttggaaaaaatgttcagattcttgacatctatagtcccacacttagatcccaaaatgattatggacgggctgggagatccgaaagttaataatgaaaagctaaacagtgcgaataacattgggttaaatcgcgacaacacaggcactatagatgaactaaaatccaacgattctttcataaacgatgatcgtaattctttcaccaatgctacaaccaacgcccgtaataacatgagtcccaacaatgatgacaatagtattgacaccgctagcactaataccaccaacagaaagaaaaatatagatgaaaacatcaaaaataacaacgacataattaatgacattatatttaataccaaccttgccaacaatctcagcaattacaattccaacaataatgctggctcgccaataaggccctataaacaaagatatcttttgaaaaatagagccaattcctcgacatcgagtgagaatccaagcctaacgccctttgatatcgaatctaataatgaccgcaaaatttcagaaattccttttgatgacgaagaagaagaagaaacggattttaggccttttacctcgcgagatcctaataaccaaacgagtgaaaacacttttgatccaaacagatttacgatgctctctgatgatgatttaaaaaaagattctcataccaatgacaataaacacaacgaaagtgatcttttttgggacaacgtacatagaaatatagacgaacaagatgcaagactccagaacttggaaaatatggttcacatactttctcctggatatcctaataagtcgttcaacaacaaaacttcctcgacaaacactaattccaatatggaaagtgctgtcaacgttaatagccctggtttcaacttacaggattatttaactggagagtctaattcccccaattctgttcattctgttccctccaatggcagcggctccacaccgttgcccatgccaaatgataatgacaccgagcacgcaagtacaagtgtcaatcaaggcgaaaatggaagcggattaacgcccttcctcacggtagatgatcacacactaaacgacaataacactagtgagggaagtacaagggtgtcccccgatataaagttcagcgccactgaaaacactaaagtgagtgataacctgccaagctttaatgaccacagttattccacccaggccgacacggcgcccgagaacgctaagaaaagatttgtggaggaaataccggaaccggctatagtcgaaatacaggacccgacagagtacaacgatcaccgcctgcccaaacgagctaagaaatag

SEQ ID NO: 180 - DNA, 1794 bp, Saccharomyces cerevisiae
atgaacaccggtatctcgcccaaacaggacgacgcctctaactccaacttactcaacataggccaagaccattcgctgcagtatcagggtctcgaacacaacgactcccagtacagagatgcttctcaccagacacctcaccaatacttgaaccagtttcaagcccagcctcaacaacaacaacagcagcagcagcagcaacaacagcaacaacaacaagcgccttatcaaggtcacttccagcagtcgcctcaacaacaacagcaaaatgtttattatccactacctccacaatctttgacgcaacctacttcgcagtcgcaacaacaacaacagcaacaacaacaacaacagtatgctaattcgaactcaaattcaaacaacaatgttaatgttaacgcgctacctcaggatttcggttacatgcaacaaaccggatcgggccaaaactatccgacgatcaatcaacaacaattttccgagttttacaactcctttttaagtcatttaactcaaaaacagacaaacccttctgtcacgggtacaggcgcgtctagtaacaacaacagtaacaacaacaatgttagtagcggcaataacagcactagcagtaatcctgcccagctggcagcctcccaattaaaccctgccacggctgctgcggccgccgcaaacaatgctgctggcccggcttcgtacttgtctcagctcccacaggtgcagagatactacccgaacaacatgaacgctctgtctagtcttttggacccttcctctgcaggaaatgctgcaggaaatgccaacaccgctactcatcctggtttgttaccacccaatctgcaacctcaattgactcaccaccagcagcagatgcagcaacagctgcaattacaacaacaacagcagttgcagcaacagcagcagctacaacagcaacaccagttgcaacaacaacaacaacttcaacaacaacatcatcatctacaacagcaacagcagcaacaacagcatccagtggtgaagaaattatcttccactcaaagcagaattgagagaagaaaacaactgaaaaagcaaggcccaaagagaccttcttccgcttatttcctgttttctatgtccataagaaatgagttgcttcaacaattccctgaagcaaaggtccccgaattgtctaaattggcttctgcaaggtggaaagagttaacggatgatcaaaaaaaaccattctacgaagaattcagaaccaactgggagaagtacagagttgtgagagatgcttacgaaaagactttgcccccaaagagaccctctggtccctttattcagttcacccaggagattagacctaccgtcgtcaaggaaaatcctgataaaggtttaatcgaaattaccaagataatcggtgaaagatggcgcgagttagaccctgccaaaaaggcggaatacactgaaacttacaagaaaagattaaaggaatgggaaagttgttatcccgacgaaaatgatccaaacggtaacccaaccggtcactcacataaggccatgaacatgaatttgaatatggacactaaaatcatggagaaccaagacagtatcgagcacataaccgcaaatgccatcgactcagttaccggaagcaacagtaacagtaccaacccaaatacgcccgtttctcctccgatttcattacagcagcagccgctccaacaacaacaacaacagcagcaacaacaacaacacatgttattggctgaccccactacaaatggttcgatcataaaaaatgaataa

SEQ ID NO: 181 - DNA, 1296 bp, Saccharomyces cerevisiae
atggtagtacaaaatagcccagtttcgtctgttcacacagccaatttctctgaacgggggagcaataccagaacaatgacgtataaaaataagcttactgtttgcttcgatgacatcctaaaagttggagcagaaatgatgatgcaacaacagttaaaaaatgtacaactagattcttatctcgtcaatggtttcagtcaatctcagcaaaaattattgaaagagaaggttaaattatttcatggaattttagatgatttagagacttctctaagccagagttcttcatatttagaaactcttactgcactcggaaaagaaaaggagaaagaaagagaggaagctgaaaaaaagagggctgaacaagaaaatatgaggaaggttagagaacaagaagaattaaaaaagcgacaagaactcgaagaagcctcccaacagcagcaactccagcaaaattcaaaggaaaaaaatggccttggtttgaacttctccacaacagcacctgcgaacacaacggatgccaacggttccaaagagaattatcaagaacttggatctcttcaatcatccagtcaaacacaacttgagaacgcaaatgctgctaataacggtgccgcattttctcccttaaccactactcgaatccaaagccagcaggcccaaccctcggatgtaatgttcaacgatttaaactctatggatatttcgatgttttcaggccttgacagtactggttttgactccacagccttcaatgccacggtggacgaaaccaaaggctttgacgataatgactcaggtaacaactacaatgacataaatatttcttctattgaaaacaacataaataataatatcaatagcaccaagaacggcaaggataacaacaacgaaagcaacaaaaataacaacggcgatgaaaagaataagaacaacaacgaggacaacgagaacaacaacaacagcagtgagaagaacaacaataataataataataacaataacaacaatgacgataacggcaacaacaacaacaacaacagtgggaacgacaataacaataccaccaacaacgacagcaataacaagaacaattctatcactaccggaaatgataatgaaaatatagttaataatgatttaccaacgaccgttgtttccaatcctggagataaccctcctccagccgacaacggtgaagaatacttgacattaaatgatttcaacgaccttaatattgactggtcgaccactggagataatggcgaattagacctcagcggcttcaatatatag

SEQ ID NO: 182 - DNA, 576 bp, Saccharomyces cerevisiae
atggaggatcaggatgctgcatttatcaaacaggctacagaagcaatagtggatgtatcattaaatatagataacatagatcctataataaaagagttattagaaagggtaaggaataggcaaaacaggttacaaaataaaaaaccagcactcataccggcagaaaatggtgttgatataaatagtcaaggcggtaacataaaggttaaaaaggaaaacgcattaccaaaaccaccgaagtccagcaaaagcaaaccccaagatcgtagaaatagtactggtgaaaaaagatttaaatgtgcgaaatgttcgttggaattttcaagatcatcagatttgagaaggcacgaaaagacacacttcgccatattgcctaacatttgtcctcaatgtggcaaaggttttgcaaggaaagatgcattgaaaagacattatgatacactgacatgtaggagaaacaggactaaattactaactgcgggtggtgagggtatcaatgaattactgaaaaaagtcaagcaatccaacatcgttcatcgtcaagataacaaccacaatggtagcagtaatggctga

SEQ ID NO: 183 - DNA, 2019 bp, Saccharomyces cerevisiae
atgaagcaggagcagtcccacgaaggcgactcatacagcacggaattcataaatctctttggcaaagataccgcaacacaccctagcagcaacaacggtgctaataataatggcatggggagcacgaactcgttggaccagtttgtggcaacagcctcatcgtcatcttctctggtgaccagcagcgagaataggcgccccctaataggtgacgttaccaataggggcaacactaacctatatgaccacgctgtcacgccagaaatactcttagaacagttggcctacgtggataacttcataccatctctggataacgagttctctaatgtggattggaatgtgaataccacccataataatgcaaacaataatggcgcggacactttcagcagcataaatgcaaatccttttgacttggatgaacaactagccattgagttgagtgcgtttgccgacgattctttcatcttcccagacgaggataagccgagcaataacaataacaacagcaataatggtaatgacgaccatagcaaccacgacgtattgcatgaggacccttctaccaataatagacaaagaaatcctcacttcttgactcaaagaaggaatactttcctaacttcccaatacgaccaatcaaagtctcgattttcgtccaaaaacaaaagaaatggcaataacggcgaaacaaacaactttggcgacaatatgcaaaataaccatccttttgagccaaactttatgggaagcccttctcagtttcccgctgacgcaactaatatgacatcaatcgaccatggcggcttcacaaatgttgacattacatcaactgagaacaatactaccggtgacaatggagtggatgcgctatcaaatctactacataggacaacacacacaccgaaccgctcctcccccctaagcaatgtcacttctgctcaaaattcctcttcacaacaacgaaaacattcggaaagcaaagtcgatagtaacagcgataataacagctccaacaaagcccccaatataactgttcctgactattcaattataccaacctctgttttagtaactctattaccgagggtcaacgtgcccaacggcgcatataactcgttgatcagcgcgggatttgacaatgatcaaatagatgctatagccgcaataatggcgtatcatcatcaaaaaaagattagggaaaataacagtaataataataaaaacatcaacaccaatgacagtcaagaggcacccattctaaaaaacatcaacgaacttttaagtgtcttaataccaccctctccggctgaaactgctgcgccaactaccttatcaacgtcgccttcgttcaatgagcacggtgtagtagcagaggcttcttttctaagctccattttggaactgggcataaagcatccaaaaagtaataatattcacaatcaacgacaaccttcacgaaacgatcataaaatatcaagagagagtgacggtaacaatggaaacgataatgtccatcataataacgctgttattaagtcaagtacgacgcgtggagacgaaattgccaagatacgatccgagccaactttaaatgcaagttcttctgatcacaaggaaaatagtttaaaaagatcacactccggagatttgaaaaataaaaaagtacccgtcgaccgcaagtattctgataatgaagacgatgaatatgacgatgcagatttacacggctttgaaaagaagcaactgatcaagaaagagttaggggacgacgatgaagatttattgatacagtcgaaaaaatctcatcaaaaaaaaaaactaaaggaaaaggagttagaatcatcgatacatgaactgaccgaaattgcagcatccttacaaaaacggatacatacgttagaaacggaaaacaagcttttaaagaatttagttctgagtagcggtgaaacggaaggaataaaaaaagctgaaagcttaaagaagcaaatttttgagaaggttcagaaagaataa

SEQ ID NO: 184 - DNA, 2277 bp, Saccharomyces cerevisiae
atggataacacgaccaatattaatacaaatgagcgctctagtaacacggattttagctcagctcccaatatcaaaggtttgaatagccatactcagttgcagtttgatgcggattctcgagttttcgtttcggatgtaatggctaagaactctaagcaattattgtacgcccatatttataactatttaatcaaaaacaattactggaactctgccgcaaaatttttaagcgaagctgaccttcctttatctagaataaacggatctgcttcgggtgggaaaactagcttgaacgccagcctgaagcagggattaatggatattgcatctaagggtgacattgttagtgaagatgggctattaccttcgaaaatgctgatggacgctaatgacacgtttttactggaatggtgggaaatttttcaatcattgttcaatggagacctagaatctgggtaccaacaggatcataatcctttaagagagagaataataccaattttgccagctaattctaaatctaatatgccttcccatttctctaatctcccaccaaatgtgattccaccaactcaaaatagttttccagtttcagaggagagttttaggcccaatggtgacggaagtaactttaatttaaacgatccaaccaatcgaaacgtctccgaaagatttctatcgagaacttccggtgtctacgacaaacagaatagcgctaattttgcacctgatactgctataaacagtgatattgctgggcagcagtacgcaactataaatctacataaacacttcaatgatttgcaatcaccagcacagccccagcaatcatctcaacagcagatccagcagcctcagcatcaaccccagcatcaaccgcaacagcaacagcaacagcaacaacaacaacaacaacagcaacagcaacagcaacagcaacagcagcaacagcaacagcaacagcaacaacatcaacagcagcaacagacaccgtatcctattgtcaacccacaaatggtccctcatattccatcggaaaattctcattcaaccggacttatgccttcagtgcctcctacaaatcaacaatttaatgcacaaacccaatcttcaatgttttcagaccagcagcgcttctttcaatatcaattacaccaccaaaatcaaggacaggcgccatcttttcagcaaagccaatctggcaggtttgatgacatgaacgctatgaaaatgttttttcagcagcaagcactacagcaaaattcactacagcaaaatcttggaaatcaaaattatcaatctaatacacgtaacaatactgcggaagaaactacgcccacaaatgacaataacgcaaatggcaatagtttattgcaagaacacatacgagcccgcttcaataagatgaaaacaattcctcaacaaatgaaaaatcaaagcactgtcgcaaatccggttgttagtgatataacatctcaacagcagtacatgcatatgatgatgcaaagaatggcggctaaccagcaattacaaaatagtgcctttcctccagacactaatcgtatagcgccagctaacaacactatgccattacaaccaggaaatatggggtctcctgtcattgaaaatccaggtatgaggcagactaatccatccggacaaaaccctatgatcaatatgcagcccttatatcaaaatgtttcttccgcaatgcatgcgttcgctccgcaacaacaatttcatctaccacaacattataaaaccaatacttcagtaccacaaaatgattctacctccgtctttcctttgcctaacaataacaataacaataacaacaacaacaataataataataataataatagtaataatagtaataataataataataataataataataataataatagtaataatacacccacagtatcacaaccatcatcaaaatgtacttctagctccagcacaactcctaatataactacaacaattcaacccaagcggaaacagagagtgggtaaaacaaagaccaaggaatcaagaaaagttgctgcagctcagaaagttatgaaatctaagaaactggaacaaaatggtgattcagctgctacaaacttcatcaatgtcactccaaaggacagtggcggtaagggtaccgtaaaagttcaaaacagtaactcgcagcaacaactaaatggctctttttctatggatacagaaacattcgacatatttaacattggtgacttttctcctgatctaatggatagctaa

SEQ ID NO: 185 - DNA, 3144 bp, Saccharomyces cerevisiae
atggtcgaaaatagtacgcagaaggccccacatgccggaaatgatgataatagctctaccaagccatattcggaggcgtttttcttagggttcaataacccaacgcctggattagaagctgagcactcaagcacatcgcctgcccccgagaactccgaaacacataataggaaaagaaatagaatattgtttgtctgccaggcttgtaggaagtcaaaaacaaagtgtgatagagaaaaacctgaatgtggtcgatgcgtcaagcatgggttaaaatgtgtttatgacgtatcaaaacagccagcaccacgaattccgagtaaagacgccattatatcaaggttggaaaaagatatgttttattggaaagataaagctatgaagctactaacagagagagaggtgaatgaatcaggcaagagatcagcaagtccgatcaatacaaacaatgctagcggggacagtcctgataccaagaagcagcataaaatggaacctatatatgaacaaagtggtaacggggatataaacaatggtaccagaaatgatattgaaatcaacttgtatagaagtcatccaaccatgatcatgagtaaagtcatgaaaagagaagttaagccgttatctgaaaattatattataattcaggactgttttctaaaaatcctggtcacttcagtgttccttgacacttcaaagaacacgatgataccggcattgacggcaaacgcgaatattacaagagcccagcctagcgtagcaaataaccttttgaaattgaaggaaatgctaatcagacagtgtcaaaccgaagatgaaaaaaatcgtgtaaacgaattcactgatagaatactacaaaatacaaattcaaatagaaacttgaaaatcggtatgctattatcaatgctttacaattctgtcggttaccaatatctggaggatcattgccctcaaggtggcgaatattcggatttattgagaaatttgatcaatgaatgtgaagctattttgccatcttacgaaattattgaacgctacaagaaccacttttatgagtacgtttatccaagtctacctttcatcgaattagaaatttttgaagaatcattaagtcaaacaatttttccggacccaaacaacccctccaaggtgcaaatacgtatgggtagcacacatttgagagctaaggtggaaaacttgagtcttctattggttatcttgaaactctcatacatgtcaataaggtttttagatcatagtacagcagactcgagtttttatctttcaaaggaaataattgataaatacccaataccgaacgattttattttattgagtcaaagatgtctagcatcggaaaattggtgtgcatgcgctaatgaaaacatcatatcatgtttactatatatctggtctttttttgctttttctcctgaagagggtgatttctttctcgagcaccccaccgatgttatcagtagtttgataatgatgctttccacctcgattggtctccacagagatccttcagatttccctcaattgatttccccgtccacctcagataaaagaaccttgaatcacagaagaatactctggttgagtatcgttaccgtttgttcgtttgaagcaagtctcaaaggtagacattctgtctcaccgatatctttaatggccttattcctaaatattaaggatcctgattctctgacggtatatatgaaccgagttaggggcgatctaagcgatatcaataatcacaaacttttgagaattcataaatttacattcaagagagcccagcttgcgttactcctgtcggacttagataacttgacgatgacatactatggtagtttccatttgcattcaattgaattcataagagaaaagattgagatttttgtggaggaaaactttcccatagtaccattaaaaagtgtcgcacaggataagtcagaccttgatgacatgaatgtgatttcagaaatgaatatattatcttcagaaaattcttcttcatttcacaatcgaataatgaataaactattgatgttgagaacttcaatggccgtattcttgcattttgaaacacttatcactaaggataaaagtatcttcccattctacaagaaatactttatggttagctgtatggatgcgttgtcactaataaattatttcaataagtttttcaacggagaatatcgacacgcaatatcttctttaaccagttttaatgttacaaaatttattcagttagcactatccagcacaatcttcagcctattagggattatactaagaataggtttagccatccatatgttatcttctgaagtacaaaagttatcgggaacgacagatccaagaataaaggagttaaataccaaagtcgaaaaatttagtaccctgcaaagagatctcgagtctgctttagaaggtatatattgctctgcttcggaacatttaagattcacatacttccccgtttttaagatgttggctttattcgatgtcattgtacaaaggatgagaaagggtgaattatggcacggcatatttacgatgattcaaatggaacaaatgcattctaggataatcaagacattaagcattaccttaggagtcaaactggacaaaaaggataggctattagaggaattgatggcatgcaatcacgttgcgaattttagcgttgaagatatagatgagctgaaccgtaatatcaaaaaagagattcaaatttcttcaggattgaagccgcctgtaaacacaattgacttaaccaacggcgaaccattcggaaatgctgttcctaccttcacaaagacatggagttcatccttagataatttagaaaaactatcatcggccgctgcagttggtcagagcttggactacaacagtggtttacgtcagggtcctttggcgggtggtggttcaaaagagcaaacgccaatagccgggatgaataacttgaacaattcaatcaatgctacaccaattgtcgataactcatctggatcacaacttcctaatggtttcgatagaggccaagcgaataatactccttttccaggttattttggaggtttggatttatttgattatgactttttgtttggcaatgactttgcttaa

SEQ ID NO: 186 - DNA, 1596 bp, Saccharomyces cerevisiae
atggcttctacggaacttagcctaaaaagaaccttaacggatattttagaagacgagttgtaccatactaatccaggtcacagtcagtttacgagtcattatcaaaactatcatccaaatgctagtattactccatataagttggtgaataagaacaaggaaaacaacacttttacgtggaatcattcattacaacaccagaatgaatcgagtgcagcttcgatacccccacaacaaacctaccatttcccgatattcaacaaatacgcggatcctactttaactaccaccacctcttttacgactagtgaagcaacggccaacgatagacagattaataatgtccatctcataccaaacgagattaagggtgctagcgaaaccccattgcagaagaccgtcaatctaaagaatataatgaaagtatcagacccgtatgtaccgacacggaatacgttcaattatgatgttaaaatttccaacgattttttcgataacggtgacaatctatatggtaatgatgaagaagtgcttttctatgaggataattataatccgaaaatgcagtggtcacttcaagataatagcgccgcaataaacaatgaggatgcgagagctatttttaacaatgaatttgactctgatgacgacgatatcagtgatgatgaagaggatgaaatagaagaaaattgtttgcaacaagagcaacaccaagaggagcctttactgtcattggatgttacaccaatctcaatgtttggctcagatcaaaaaacgggtcgtgccaagagttctagtcatttatttaatgagtacagttacgttgactctaacatggacagcatttccagtgttgtatctgaagatctgttagatgaacggggacatgagaagatagaggatgaggatgaggataatgatcttgatgaagacgatatctacgatatctctctcttgaagaacagaagaaagcaaagttttgtcctcaataaaaacactattgattttgaaagatttccatctccctcaacctcggcaaacgtaccgtctactgctactaccggtaaaaggaaaccagcaaaatcatccagtaaccgtagttgcgttagtaacagtaatgaaaacggcacattagaaagaataaagaagcctacatcagctgtagtaagctcaaatgctagtaggcggaagctaattaattatactaagaagcacttatcttcacattcatctacaaattcgaattcgaaaccttcgactgcatcaccatcggcccatacgtcatcttctgacggtaataacgaaatatttacgtgtcagataatgaatctcattacaaatgaaccgtgtggtgcccaattttcaaggtcctatgatttaacgagacaccaaaataccattcacgctaaaaggaagattgtcttccgttgctcggagtgtataaaaattcttggatctgagggctatcagaagacgttttcgagactggatgctttaacaaggcatataaaatcgaagcatgaagatttgtcgttagaacaacgtcaagaagttacaaaatttgcaaaggctaatattggttatgtcatgggttaa

SEQ ID NO: 187 - DNA, 1461 bp, Saccharomyces cerevisiae
atgatgaacaataacgaaagtgaggctgagaaccaacgtctactggacgaattaatgaaccagacaaaagtcctccaggaaactttagatttttcgttagtgacacccactccacaccacaatgatgattacaagatacacggaagtgcctacccaggtggtgagactcctgcccaacagcatgaaaaactctcatacatcaatacgcacaactctaacgataataataacttaatgggcagtcaagcgaggtccaattcacaaactcctacagcttcgaccatatatgaggaagcagaatcgcaatcgtcttacctggatgatatgtttagaacaagccaaggcggtagacctgtcactcaaaattccatatcttccatagggcagggtcccttgagatcatcttattctatggcttacgactcacctgtggatagagcaatgaatactccattacagcaacaagaaggcttaaaagctgagttaccacatgactttttatttcagcatggcaccgatgacacaatgtataacttaactgatgatttgagctcctctttatcttctagcatcaattctgatatgatgacaccaaacacatattcatcatcattttcttataatccacaaagcttgggcccagcatccgtatcttccacatattccccaaaggtaagatcaccatcatcgtcatttcgtgcaggaagtttcctttcatcttcttttaggcatggtagcataaacacacccagaacaagacacacttcaataagtagcaatatgactgaaaatataggacctggaagtgttccaaagattttaggcgggttaacttctgatgagaaactgaggcgcaaaagagagtttcataatgccgtcgaaaggagaagaagagaattaataaagcaaaagataaaagaactcggccagttggttccaccatctttattgaattacgatgacctaggtaaacaaatcaaaccaaataagggtatcattttggatagaacggtcgaatatttacaatacctggccgaaattttagaaatacaagcacgaaaaaagaaggcgttattggcgaagataaaagaattggaagagaagaaaagttctgtcgcagcattatctccttttaccaataaccaccatgccagttcggggcaaaataatagcgagaatagtgaggaaagaattatagatattagatctgtcccaaatgctttgatgaatgaacaaaatagtaaggctgaattgcacaattgggagccaccgttatatgattcggtcggtaaccacaatcatgctggcactatggagagtcatccacatacaaacattcatgaagaattaaaggagttcttatcaggcgatttgattgaagccgaagataatgcaaaattaatgtttggagatgacaactctaatccagctgactatcttttagaatttggttcggggtag

SEQ ID NO: 188 - DNA, 2301 bp, Saccharomyces cerevisiae
atgagtgaagaggaaacggtctcagccccagctccagcttctacaccggccccggctggaaccgatgtaggtagtggtggagcagcagctggaatagctaatgctggtgctgaaggcggcgacggtgccgaggatgttaagaaacatgggtcgaagatgctagtggggcccaggccgccacaaaatgcgatattcatccataagctataccagattctggaggacgaatcgctacacgacttgatatggtggaccccttcgggcttatccttcatgattaagcctgtggaacggtttagtaaggctttggctacatatttcaagcatactaatatcacgagctttgtaagacagttgaacatttacggctttcacaaggtgtcgcatgatcatagcagcaacgacgctaatagtggcgacgacgccaatactaatgatgacagcaatactcacgatgataatagtggcaacaaaaacagtagtggcgacgaaaataccggtggcggtgtccaagaaaaggagaaaagtaaccccactaaaatctgggaatttaagcatagttctggtattttcaagaaaggtgacattgagggactcaaacacattaagagaagagcttcttcccgtaataactcctcaattaacagtcgaaagaattctagtaatcaaaactacgatatagattccggtgcaagagtaagaccctcttcgattcaagacccgtccaccagttccaattcctttggtaatttcgttccgcaaattccgggcgccaataactctatccccgagtactttaataactctcatgtaacttacgaaaacgcaaaccatgccccgctggaatccaataacccggaaatgcaagagcaaaacagacctccgaactttcaagatgaaacactgaaacatttgaaagaaataaattttgatatggttaagattatagagtctatgcagcatttcatatctttgcaacacagtttttgttcacagagtttcaccttcaagaatgtgagcaagaaaaaatcggaaaatatcgtgaaggatcaccaaaagcaacttcaggcattcgaaagcgatatgttaactttcaaacagcacgtcatgtcgagggcccaccgtacaatagattctctttgtgctgtaaatgctgccgctaccgctgcctctgtcgcccctgcacccgcgcccacatccacatctgcatatgcacccaaatctcagtatgagatgatggttcctccagggaaccagtatgtcccgcagaaatcttcctcgaccacgaacatcccttcgagattcaacacggcttcagtgccgccctcgcaactttttgtacaataccaaccgcagtcgcaacaacatgtgacttatgcgaagcaaccggcacatgtaccaaactttatcaatcagccgatacccatccaacaactacctccacaatatgcagacacttttagcactccacaaatgatgcacaatccttttgcctcgaaaaataacaacaaaccgggcaacacgaagaggaccaatagtgttctcatggacccgctgactcccgcagcgagtgttggagttcagggtccactaaactatcctatcatgaatattaatccttctgtccgtgactacaacaagcctgtccctcaaaatatggctccgagtccaatatatcctattaatgaaccaacaacgagattgtattctcaaccaaaaatgagaagtctcgggtctacaagctctttgcccaacgatagaagaaacagtcctctgaagctgacaccgagatcatcgttgaatgaagatagtctgtatcccaaacctagaaactctctcaaatccagtatttcgggcacgtctttatcctcctcttttacactagttgccaacaatccagccccaattcggtactctcagcagggattgcttcgctcattaaacaaagctgctaattgtgctccagattcggtaactccattagactcgtctgtcttgacgggccctcctccaaaaaacatggacaatcttcctgctgtttcttcaaatttaataaactcccccatgaacgtcgagcacagctcaagcctatcacaagcagaacctgcaccacaaatagaactaccgcagccatctttgcccacaacgagcaccactaagaatactggcgaggctgacaatagtaagagaaaagggagcggtgtttattctttactgaatcaagaggatagcagcacgtccagtgctgatcctaaaactgaagataaggccgctccggcactcaaaaaggttaagatgtga

SEQ ID NO: 189 - DNA, 2052 bp, Saccharomyces cerevisiae
atggattttacaacaatgactatggcaagcaatatggctactagtactactacgacggctacatcggcacatgcatctataaattcgtcatcaaactttaatattgatattgattcgaaccagaatactccttccattttgataaataacaattcggattcttctaatggaaaaaacacagattttaacggcgtcaataatattcaccaaaaaaatatcatgaataatacaaataatgttcatttgtactctccaaatataatggaccaaacgctactaactccacaggacattgccaagttacggagagaatcaatagcccattctcaagggatgggtggtgtttcatggggatccattagtgttggttcttggttaagagatgaaattattagccgtagaaatagtattgtacctgcatcagcaaacggtgctgcctccgctgccgcttctgcaaccactactgccactaatactttgcagattcaacaaccaactaagagaccctctgttagtaatccgccttaccatagagggtattctatttctcctcagatagcctacactgcttatctgccaaatctagaaaagcaatattgtaaagattattcatgctgtggtctttccttaccaggtttgcatgatttgctgagacattacgaagaagctcatatatccacgtctcctaacactaccaatatgtcacaaataccgatgaactctgctggtaacactagttcatcagttcgtatgacaaataatacctcttctgccaactataacctgcagaataacatggccgctaatacaaaaaatgcaggtcataagactaatactatgcaggctcatagcagcaatgcaactaataacacctccattaataatatgcatgccaatcttcagagcaacatggattccaactccacaatacgacaatctcagcatcctcaccatcagcagaatataatacaacaacagttgcaatcgaattctgtaaatcatacatcaggggctgtacccacaccgagtgtaatgggttcagcaactgcgtcgtccacaactgcaaatccaaatgtgatatctataacgggtgcccccaactcgggcttatctatggctaatcactctcaacaactacatctgaatggtaatctagtcgatgccgtttcaacgaatgatgtgtttttaagaacgagcaattctccatcaagacacgttccgcacaataaacaaattaacagtaacaataatagtggtatcaatatcaataataatacctcacacaattctaatattaacatgggtagtaaaaacgccatggtgaatcgtccacatacttttaataactattccttgaacaaaacgtccaggaatcctattcaacatcaatcaagaaaaattgatcctcatcaaaccgatttatcacctctggtacttgtccaagatatagatttaagttttatggatgatgatattttgggccctagtaaccacaattccatgaactctgtcgtaaatccaactacaggttctcacaactacaatacttttcattcttccgtacacgcaaaatcttctcaaaacatggtcgaggatcaagacattgatgacattgatgatgacgatgatgttgatgatgacgatgacgatgacgatgacgatgacacagaaaatggctccagttccaatggaaaatcagttcataacaacaattacaagatgcctcagcaagcttatatagacgatcctgcgagaaggctctatgtaatggatcatgaggaacaaaaaccctttaagtgtccagttattggttgtgaaaagacttataaaaaccaaaacggtttgaagtaccataggttgcacggacatcagaatcaaaaattacatgaaaaccctgacggtacatttagcgtaatagatccagattcgacagattcttttggtgatggaatgggctctgcaaaggataaaccataccgttgtgaagtttgtggtaagagatataagaacttgaacggtttaaaatatcacaggggccactccactcactaa

SEQ ID NO: 190 - DNA, 1944 bp, Saccharomyces cerevisiae
atgtcaagcgaggaacgctcgagacaaccaagtactgtttcaactttcgatttagaacccaatccttttgaacaaagcttcgcctcttccaagaaggctttgtcacttccaggcacgatctcccatccgtctctaccaaaagagctttcacgaaacaattctacctcaacgataacacaacattcccaacgttccactcatagtttgaacagtattccagaagaaaatgggaattcaaccgttacagataatagtaatcataatgacgtaaaaaaagactcacctagttttttaccaggccaacaaagacctactataatatctccgcctattctcacacctggtgggtcgaaaagattaccacctctactcctttctccctctattttatatcaggcaaattcaactacgaatcccagtcagaattcacattctgtttcagtctctaattcaaaccctagtgcaataggcgtttcttctacctccggatctctgtatccaaacagctcttctccttcagggacttcacttatacgccagccacgaaactcgaacgtgaccacaagtaattctggtaacggcttccccacgaatgattcacaaatgcctggctttttattaaacttgtccaaatctgggttgacacctaatgagtccaatatcaggaccgggttgacacccggtattcttacgcaatcttacaattatcccgtattgccgtcaattaataaaaatactataacaggtagcaaaaatgtcaacaaaagtgtcacagtgaatggaagtattgaaaaccaccctcatgttaatataatgcacccaactgtaaatggtacaccacttacgccgggattgagttctctgctaaacttaccatctactggagttttggctaatccagtattcaaatcaacacctacaacaaataccacagatggtaccgtcaacaacagcatcagtaattccaatttttccccaaatacttcaacgaaagcggctgtcaaaatggataatccggcagagttcaatgccatcgagcactccgctcataatcacaaggagaatgaaaatttaacgactcaaattgagaacaatgaccagttcaataacaaaacacgaaaaagaaagagaaggatgtctagcacaagttctacttctaaggcttcaagaaaaaattccatatcaagaaaaaactcagcagttacgactgcaccagcacaaaaagatgatgttgaaaataataaaatttcaaacaacgtaacacttgatgagaatgaagagcaagaaagaaaaagaaaggagtttttagaaagaaatagagtagctgcatctaaatttagaaaaagaaagaaagagtacatcaagaaaattgaaaatgatctacaattctatgaatctgaatatgacgatctaactcaggtcattgggaagctatgcggcataataccctcaagctcctcgaattcccaattcaatgtgaatgtttcaactccgtcatcatcatcaccaccatctacatctttaatagcattgttagagagtagcatttcaaggagtgattattcaagtgcaatgtcagtattatcaaacatgaagcaattgatatgtgaaacgaatttttaccgaaggggaggcaaaaacccaagggacgacatggatggccaagaagacagcttcaataaggacactaacgttgtcaaaagcgaaaatgcgggctatccttccgttaattcaagaccaataattctagataaaaaatactcactgaactctggagcaaatatcagcaaaagtaacacaactactaataatgtgggaaatagtgcacagaatataatcaattcatgctactctgttactaatccattggtaataaatgcaaattccgatacccatgatactaataagcatgatgtactatccactctacctcacaataattga

SEQ ID NO: 191 - DNA, 1815 bp, Saccharomyces cerevisiae
atgagtgccaatagcccgacaggaaacgatccccatgtatttggtattcctgtgaacgcaacaccatccaatatgggttcgccaggcagtccagttaatgtaccacctcctatgaacccagcggtagcaaatgtaaatcatcctgttatgaggacaaacagtaatagtaatgccaatgaaggtactaggactttaaccagggagcaaatacagcaattgcagcaaagacaacgattattactacagcaaagactactcgaacaacagagaaaacagcaagcactccaaaactatgaggctcagttttatcaaatgcttatgaccttaaacaaaagacctaaaagactttacaattttgtggaagatgcagactcaattttgaaaaaatatgagcaatatttacacagttttgaatttcatatttatgagaataattataagatttgcgctcctgcaaatagcaggttacaacagcagcaaaagcaacccgagctgactagtgacggtttaatattaaccaaaaataacgaaactttgaaagaatttttagagtacgtcgcaagaggaaggattcctgatgctattatggaagtcttaagggactgtaatatccaattttacgaaggaaatcttattttacaggtttatgaccatactaatacagttgatgtcacccccaaagagaacaagcctaatttgaacagctcttcttccccttcaaataataatagcacacaggacaattccaagattcaacaaccatccgaacctaatagtggtgtggcaaatacaggcgcaaacacagcaaataagaaggcatccttcaaacgacctagagtatatcgaacattgttgaagcctaatgatttgacgacgtattatgacatgatgtcttatgcagataatgccaggttttctgatagcatttatcaacagtttgaatctgaaattttaacacttaccaagaggaacttgtcactaagtgtgccattaaatccatatgagcaccgagacatgttggaggaaacagctttttcagaacctcattgggatagtgaaaaaaaatccttcattcacgaacatcgtgctgagtctacgagagaaggcacgaagggcgttgtagggcatatcgaagaacgcgatgaatttccgcaacatagttcaaattatgaacagttgatgttgatcatgaatgaacgcacaacaacgataaccaactccacgtttgctgtttcgttaaccaagaatgcgatggagattgctagctccagttccaacggggtacgtggagcttcgtcctcaacttcgaattccgcatcaaatacaaggaataacagtttggctaatggcaatcaagtagctttggcagcggcagcggctgcggctgcagtgggatctaccatgggtaacgataataatcaatttagcaggctgaaatttattgaacaatggagaataaataaagaaaaaagaaaacagcaggctttaagtgcaaacatcaatccaacccccttcaacgctagaatatcgatgacagcaccattgactccacagcaacagctacttcaaagacaacagcaggccttggagcaacaacagaatggtggagccatgaaaaacgcaaataaacggagtggtaacaatgccaccagtaacaataataataataataataatttagataaaccaaaggttaagcgacctagaaaaaatgcaaaaaaaagcgagagcggtacaccagctcctaaaaagaaaagaatgactaagaagaaacagagcgcaagtagcacgccctcttctactacaatgtcataa

SEQ ID NO: 192 - DNA, 1014 bp, Saccharomyces cerevisiae
atgatggacaagcataagtatcgtgtggagattcaacagatgatgtttgtctctggtgaaattaacgacccacccgtagaaaccacatcactgatagaagatatagtgaggggtcaagtgatagaaattcttttacagtcaaacaaaacggcgcatcttaggggaagtaggagcattctccctgaagacgtcattttcttgatcagacacgacaaggccaaagtcaatcgtttgagaacatatctgtcatggaaggatttgcgtaaaaacgccaaggaccaagatgctagtgccggtgtagcgagtggcactggaaatcctggggcaggtggtgaagatgatttgaaaaaagcaggtggtggcgagaaagacgaaaaagatggtggaaacatgatgaaggtcaagaaatcccaaattaagctgccatgggaattgcagtttatgttcaatgaacatcctttagaaaataatgacgacaatgatgatatggatgaggatgaacgagaagctaatatagtcactttgaaaaggctgaaaatggctgacgatagaacacgaaacatgactaaagaggagtacgtgcattggtccgattgtcgacaggcaagttttacatttaggaagaataaaaggttcaaggactggtctggaatttcgcaattaactgaggggaaaccccatgatgatgtgattgatatactggggtttctaacttttgagattgtctgttctttgacggaaacagctctgaaaatcaaacaaagagaacaggtattacagactcaaaaggacaaatcccagcaatctagccaagataatactaactttgaatttgcatcatccacattacatagaaagaaaagattatttgatggacctgaaaatgttataaacccgctcaaaccaaggcatatagaggaagcctggagagtactacaaacaattgacatgaggcatagggctttgaccaactttaaaggtggtagactcagttctaaaccaattatcatgtaa

SEQ ID NO: 193 - DNA, 3999 bp, Saccharomyces cerevisiae
atgactgaaagaataccaataaagaattatcaaagaacaaatgccaaagctttacttaaattgactgaaaaactttttaacaagaacttttttgatctctatttaacctctcagcaattggtcgttcttgaatacctgctgtcgatttcaagtgaagaagacaaactgaaagcatgggactatttcttaaagggaaacatagcattaaatgtcgaaaaatcatttccattaacccaagaagaagaacatcacggagcggtctctcctgccgttgacacacgatcagatgatgtatcatcacaaacaattaaggacaataacaatactaataccaacaccagtatcagcaatgaaaatcatgttgaaaatgaaattgaagataaaggcgataacgcaatagcaaatgaagataattttgtgaataatgacgaaagtgataatgttgaagaagacttattcaaattagatctagaggacttgaagcagcaaataagcggaacaaggtttattggaaacttatccttgaaaatcagatacgtcttgtggcagtgcgccatagattatatatactgtgatcgtaatgagtttggtgatgaaaatgatacagaatacaccctattagatgttgaagagaaggaggaagaggaaattggtaaaaatgagaagccacaaaacaaagaaggtatttcgaagttcgccgaggatgaagattacgacgatgaagacgagaactatgatgaagacagtacagacgtaaaaaatgtcgatgatcctccaaaaaatctcgattctatttcctcttctaatatcgaaattgacgatgaacgacgcttggtgctaaatatctcaatatcaaaagaaacactgtcaaagttaaaaacaaataatgtagaagaaattatgggaaattggaacaaaatttaccacagttttgaatacgataaagaaactatgataaagcgattaaaacttgaagaaagcgataaaatgatagagaaaggaaagaagaaacgaagtcgaagtgatttagaagcagctaccgatgaacaagatcgcgaaaatacaaatgatgagccagatactaatcaaaaattgcccactcctgaaggttcaacattcagcgatactgggaacaagcgccccaaacaaagtaatttagatttaacagtcaatctaggcatcgaaaatttatcattaaagcaccttctatcatctatccagcaaaaaaaatcccaattaggaatatcagattacgaattaaaacatctgattatggatgtcagaaaaaatcggtcaaaatggacatcggatgaaagaattgggcaagaggaattatacgaagcctgtgaaaaggttgttttggaacttagaaactacactgagcattctacaccatttctgaataaagtgagcaaaagagaagcccccaattatcatcaaatcatcaaaaagtccatggacctgaatactgttttaaaaaaactgaaaagctttcaatatgactccaaacaagaatttgtagacgatattatgctaatatggaaaaattgtttgacctataattcagatccttcacattttttgagagggcatgctattgctatgcagaagaaatctcttcagttgattcgcatgattccaaatatcacaatccgaaacagggctgatttagaaaaggaaattgaagatatggaaaaagacaaagactacgaattagatgaggaagaggaagttgctggttctggaagaaaaggattgaatatgggagctcatatgttggccaaagagaatggcaaggtgtcagaaaaagatagctctaaaaccgtcaaggatgaagcaccaaccaatgatgacaaactaacttctgtcatccctgagggggaaaaagagaaagataaaactgcttcatctactgtaacggtacacgaaaatgtaaataagaacgaaataaaagaaaatgggaaaaatgaagagcaagatatggttgaggaaagtagtaagactgaggattcatcaaaagatgctgatgctgccaaaaaggatacggaagacggactacaagataaaactgcagaaaataaggaggctggggaaaataatgaagaggaagaggatgatgatgacgaagatgaagacgaagacatggtcgactcccaatcttatttacttgaaaaggatgacgatagagacgatttggaaatatccgtgtggaaaactgtaactgccaaagttcgtgcggaaatttgcttaaaaagaactgaatattttaaaaatggaaaattaaatagtgattcagaggcgtttttgaaaaacccacaaagaatgaaaaggttcgaccagctttttcttgaatataaagagcagaaagctttagaatcatatcgtcaaaaaatagagcaaaattccattatgaaaaatggctttggaacagtactaaaacaggaagacgatgaccaattgcagtttcataatgatcactctttaaatggaaatgaagcttttgaaaagcaacccaatgatattgagttagatgataccagattcctacaggaatatgatattagtaacgccattcctgacatagtatacgagggagtaaatactaaaacattagacaagatggaagacgcttccgtggaccgcatgcttcaaaatggtatcaacaaacaaagcagatttctggctaacaaggatttaggactaacacctaaaatgaaccaaaatatcacactgattcagcaaattaggcacatatgccataaaatatccctgatcagaatgttacagagccctttatcggctcaaaactccagaagcaatcccaacgctttccttaacaaccacatttataattacactattattgatgactcactcgatattgatccggtgtcacagcttccaacgcatgattacaaaaacaacagggagctgatatggaaattcatgcataagaacatatctaaggttgctatggccaatgggtttgaaactgcccatccatcagcaataaacatgcttactgaaatcgccggggattacctatctaatctgataaagactttgaagcttcatcatgaaactaactccttaaatagaggaacaaatgtggaaatgctgcaaacaacactgttggaaaacggtatcaacaggccagacgatctattttcctatgttgaatctgaatttggtaaaaaaactaagaaacttcaggacatcaaacagaaactagaaagctttttgagagccttattaaggccaactttgcaggagttgtccgagagaaactttgaagacgagagccaaagcttttttacaggtgactttgccagcgaattgactggtgaagacttctttggttttagagagcttggattagaaaaggagtttggagttttgagttcatctgttccattacagttactgactactcagtttcaaactgttgacggggaaaccaaagtgcaggccaaaaagatccaaccggaagaatcagacagcattgtgtataagaaaattacaaaaggtatgctggatgctggttcattctggaatactctacttcccctattacaaaaagattatgaacgttccaaggcctatatagcaaagcaaagcaagtcatctgcaaatgataaaacctcaatgacttccacagaagacaattctttcgctttactagaagaggatcagtttgtctcaaagaaaaccgcaacgaaggcaagattacctcctactggtaagataagtaccacatacaaaaagaaaccgatcgcaagcgcgtttatacttccagaagaagacttggaaaacgacgtaaaagcggatccaacaacaactgtaaacgccaaagtgggtgcagaaaatgatggagattcttccttatttttgcgaacgcctcaacctttagatcctttggatatggatgatgcttttgatgataccaatatgggcagcaatagttcatttagcttgagccttcctcgccttaatcaataa

SEQ ID NO: 194 - DNA, 734 bp, Saccharomyces cerevisiae
atgggaaaatcagcgtatgtaaagctggagcgtccttcgtggcgcatcggaatttcttcaattgaactacctgttgctaacaacagttttttttttctctcttttatgtatatagcgttatattcgtggaaagagccactcccgctacactaacggaactgaaggatgctctctcgaatagtatcctgtccgtgcgagacccttggtcgatagactttcggacgtaccggtgctctatcaagaacctacccgcggatgtctccaagctcatgtactcgataacgttccaccaccatggccggcagaccgtgctaatcaaggacaactcagcgatggtgacgactgccgcagcggcggatatccctccggcgctggtgttcaatggctcatctacgggcgttcctgagtccatagacactattttgtcgtccaagctgtccaacatctggatgcagaggcagctcatcaagggtgatgccggtgagacgttgatcttggacgggctcaccgtgcgactcgtcaacctcttctcctccactgggttcaagggtctcctgatagaactgcaggcggacgaagcgggcgagtttgagaccaagattgcaggcatcgaaggacacctagctgaaatccgggccaaggagtacaaaacctcatccgactcgttggggccggacaccagcaacgaaatatgtgatttggcgtaccagtatgttcgtgctctggagctgtga

SEQ ID NO: 195 - DNA, 4284 bp, Saccharomyces cerevisiae
atgaataacggttctggtcgatacttgctgactcccccagatgatcttcacccctatgtgccaagctcgaaacctcaggaacaagtataccctgatttcaagccttgggagcacactgcagcagaagatcaaatcctagcaaactttgtggctaagggcttttaccatacaccaatggtaaatttcgagtccatatctgcgagatcatctgttcatgaatcattagtcactcaatccaacattctttcccagcaattcgacaaaattatcaagattagagaagaccacattaataagatcccctcaaattccacgacgacattacacgggcctggttttcagttgcctaatagaataacccttactgatcatagaaaggaaacgtggttgcatgaattgagttcgtctcacacttcgctggtcaaaattggcaagtttatacctcacggcttgaaaagaaggcaagtcatcgagcagtgctatttaaaatttataccattgaaaagggcgatttggttgataaagtgctgctattttatcgaatggaaatcgaaccacaaaaagaagaggtcaaatgctgctggggcagatgatgccatttccatgcacctgctaaaggactggacggatacctttgtatacatcctggaaaagctcatctttgatatgacaaatcactataacgattctcaacaactgcgtacgtggaagaggcagatttcttattttttaaaacttttggggaattgctactcactaagattgatcaataaggaaatctttcatcattggcttgtagagtttataaataagatggaaaacttcgaatttttgccattatctttacatattttgatgattttttggaacgacatctgccaaattgatacaaatgctcctgttgcggctacaataacatcaagtcaaaaagagcccttctttctggtaacaaaaatcactgatatgctattgcacaaatattatattgtttccagcagcaaatcaatgataaatgacgagaactacatcatcaatgatataaagaaaaacaacaagataaagttgaatattctcaaaatattatccagtttaattttgaaaatttttcaagaacaatctttagaggtgtttatatttcccacatctaactgggaaatttacaagcccttactttttgaaatagtctcaaacgccgacactaatcaaaattctgatatgaagaaaaaattagagttaattagttacagaaacgagtcattgaagaataattcttctatacgaaacgtaataatgtctgccagcaacgcaaatgactttcaattaactatcgtcacctgtaaacaatttccaaaactatcatgcattcaattaaattgtatagatactcagttcaccaagctactggacgataaccctacagaattcgattggcccacttacgttgaccaaaatccccttacaatgcataaaattattcaattaattctctggtccatacatccatcaaggcaatttgatcactatgaatctaatcaactggtagcgaaattattactattgcgaataaattcaacagatgaggatttgcacgaattccagatagaagatgccatttggtcattggttttccaattagccaaaaatttttcggcccaaaagagggtggtatcatatatgatgccttctttgtatcgcctgcttaatatactaattacttatggcatcattaaggtccctacgtatatcagaaagctaatcagttccggcctactttatctccaagattccaatgataagtttgtgcatgtccagctgttaattaacttgaaaatttcaccgttgatgaaaagtcaatacaatatggtattgaggaacgttatggaatatgacgttaaattttatgaaatttttaatttcgaccaactcgtggaaatcacagaacaaatcaaaatgcgaatactctccaatgatataactaatttgcaactgtcgaaaactcctctgagcattaaaatcatggttgcagaatggtacttatcacatttatgttccggtattttatctagtgttaaccgcacagtgttgctaaaaatattcaagattttttgtatcgatctggaggttttccaccacttttttaagtggatcgagtttattgtctaccatcaattgctaagtgatatagaatctctggaggcattgatggacatcttgctatgctaccaaaaattgttctcacaattcattaatgaccatattctttttacgaagacgttcatattcatttacaagaaagttttgaaagaaaaagacgtgcctgcttataatgtgacttcatttatgccattctggaaattttttatgaaaaacttcccttttgttttaaaggtggataacgatttaaggattgagttacaatctgtttacaatgatgagaaattgaaaactgagaagctgaagaatgataaatcagaagtcttgaaggtgtattccatgatcaataattcaaaccaagctgttggacagacttggaattttcccgaggtgtttcaagtaaacatcaggtttctactacacaactccgagatcattgatacaaatacaagcaaacagttccagaaagcacgaaacaatgtcatgcttttgattgccactaacttgaaggagtacaataaatttatgtccattttcttgaaaaggaaagactttactaacaaaaatttaattcaattgatctctctaaaacttctaacttttgaagtgacgcagaatgtgttggggctcgagtatattattcgattattaccaataaacttggaaaataatgacggctcatatggtctgtttttgaagtatcataaagaacaattcataaagtcaaattttgagaaaattttacttacatgttatgaattagaaaaaaaatatcatggcaacgaatgtgaaataaattattatgagatcctattgaaaattttaataacttatgggtcatctcccaaattacttgcaacatctacaaaaatcattatgttgttattgaatgatagcgtggaaaactcatctaatattttggaggatattttgtactactcaacttgtccgtcggaaaccgatcttaacgatattccattgggtagtggacaaccagacaatgacactgttgtaaccaacgatgataaaagtgacgatgatgatcacacagtcgacgaaattgatcatgtagaatattacgttatgatggactttgccaatctttgggttttccaagcgtttacctgtttctgcatcaaaaaaatcatggagaataatgagccagcaatggcaatggaagacttgaagaacttcatattccaaattatcgaaataactaattctaatgatttatgttcacaaatatttgaccaactgaaggatatgcagaccattgagatgataacccaaatagtggagaaagatttctgcacttcttgtttgcaaaacaacaaccaaaagatagatgataattacatcgttgtggtgatcgagattataacgtcattatcgatgaggtttcaaagagaaacttctggtatgatagttatttccatggagaactatcatttactaataaagatcataagacaattaagtgaactgaacgaaggaaatttatctaagagagaaatccaaatagatgccgtcttgaaaatttttagctttcatcaggattccattttccaacgcatcatcgctgatttatcagctgataaacccacaagtccattcattgatagcatatgcaagctgtttgataaaatatcatttaatttaagattgaagctgttcttgtacgaaattttgtcttcattgaaatcattcgccatctattcatccacaattgatgccccagcattccacacaagcggtaaggtcgaactaccgaagaaattgctgaacttaccaccattccaagtgtcctctttcgttaaggaaacaaaacttcatagtggcgactacggggaagaagaagatgcagaccaagaagaatcgtttagtttaaatttaggaatcggcatagttgaaatagcgcacgaaaacgaacagaaatggctcatttatgacaagaaagatcataaatatgtctgcacattttccatggagccgtaccacttcatctccaactataataccaagtacacagatgacatggctacaggcagtaatgatacgactgcgtttaacgattcctgtgtaaacctgagtctttttgatgctcggtttgagaggaaaaatccacattga

SEQ ID NO: 196 - DNA, 4263 bp, Saccharomyces cerevisiae
atgagttctgacgcttccacgtacagacttgaggatgttttatccagcttctatagagtggagaaaatcaaaaagatcaactatcatcagtacatttctaaagcccaaaacgatcaatggtctatccaaatggaattcatgctacggaagcaggatccaaagactctagttgcgctgctttcaagggatttatggtgtttcagtataaatgatgatccggtaccgacacctcctgcgatagaacataaaccagtgagcccagataaaatcggaactttcactgccgattattcaaagccaaacttaccgccacactatgctctttttttaaaagctttaagaaggaaaatttacattaatttggcattaggttcacacaataagctaatacaatttgggaatgcctgcatatcattaagcggagtgccaaattatctcgtacagctagaaccacacctttttgtaaacggagatctcacagtgtcgttatgtgccaagaacatgggattagtaccaatgaaggaggaaaatttggaagaatctttcctttcaaagcatgcgctttatttagcaccatctggaataaggatgcatttggcccctgcttccaagcaaggatacttgataacgccaccaaaacatacagaacttctcttgacgacgttaagtgtatctcatggtataaacttacaaaataaaaaaaatttgaaatgggttgctgttgttcctgacttaggacatctcaacggccacacacctactatagcttcgtatttaactcccttacttgaagcaaagaagctagtatggccgctgcatttaatcttcgcccaaccagtagctgatatagaaaattctacttccggagatccatcagaatttcactgtttgcaagatgctctggatgccattgatgatttcatacaattaaagcaaacagctgcctataggactccaggaagttccggcgtattgagcagtaatattgctggtacaaatcccttaagctcagatggagcatatacagaacagtttcaacattataagaacaactcaattagttctcaacccgcttcttatcattctgtccaagaaactaataagatatctccgaaagatttctcccctaatttcacaggcattgataaattaatgctgtcgcccagcgatcaatttgctccagctttcttaaatacccctaataataacatcaatgagaatgaattatttaatgataggaaacaaactacagtatcaaatgacttagagaacagcccactgaaaacggaactggaggcaaatggtagatcactcgaaaaggtaaataattccgtgagcaagacaggaagcgtagacacacttcataataaagagggaacactggaacaacgagaacagaacgaaaatctgccaagtgataaaagtgactctatggtagacaaggaattgtttggtgaggatgaggatgaggatttatttggcgatagcaataaatcgaattctacaaacgaatcgaacaaaagtatatcggacgaaattaccgaggatatgttcgaaatgtctgatgaagaagaaaataataacaataaaagcattaataaaaataacaaggaaatgcatactgatcttggtaaagatattccattttttccctcatctgaaaaaccgaatatccgtacgatgagcggaactacaaaaagattaaatggaaagaggaaatatttggatattccgatagatgaaatgaccttgccaacgagtccattatatatggacccaggtgcgccactccctgtggaaacaccccgcgatagacgcaaaagtgtgttcgctccactgaattttaaccccataatagaaaacaatgttgataacaaatacaaatctggagggaaattttccttcagtccgttgcaaaaggaggaagcattaaactttgatatttctatggcggatctttctagctctgaagaggaagaggatgaagaagagaacggtagcagcgatgaggatctaaagtcattgaacgtacgcgacgacatgaaaccttctgataacatcagtactaatactaatattcatgagcctcaatacataaattactcttcgatcccaagtctacaagactctattataaagcaagaaaatttcaattcagtaaacgatgctaatatcactagcaataaggaaggcttcaactctatttggaaaattcctcaaaatgatataccacagaccgagtcaccactgaagaccgttgattcatctattcaacccatagaatccaatataaagatgaccttggaagataataatgttaccagtaatccgtccgaatttacgccgaatatggtaaattctgaaatttctaacctaccaaaagacaagagtggtatccccgaattcacaccggcggaccccaatttatcttttgaatcatcaagtagtctaccgtttctattgagacacatgccgctagcatctataccggacattttcatcacgcctactcccgttgttacaatttcagaaaaagaacaagacatcttagatttaattgcagaacaagtcgtcactgattataatatcttaggaaacctcggtattccaaagatcgcctataggggagttaaagattgccaagaaggtttaataacaaccacaatgttacagttattttccactttcgatagattaaatggcaatgatacgatctccaaattctataacatgaagcagccgtacgtttttgtaaagaaacatcacgaactaatcaaagtcaaacacgactctcagccatttattaagttcctcaattttcgccctccaaatggaataaaaaacttcaaatccttattattaagttcatctttcaaagaagattgtctgtcatttgcgccaactctatctcaaacatatattaatcaagagttagggttttgtgagttgcttaaactaactaatgaagacccgcccggactgatgtacttgaaggcatttgataaaaacaagttactgttgttagctgcgcagattgtttcatactgttctaataataagaactccatcaaaaacgtgccaccaatattaataattttacccttggataatgcaactctgactgaattagtagacaaggcgaatatttttcaggtgatcaagaacgaagtttgtgccaagatgcctaacattgaactatatttgaaagttattcctatggatttcattagaaacgtactggtgacagtggatcagtacgtcaacgtagcaatttctatatataacatgctgccgccaaaatctgtaaagttcacccacattgcgcatacgctgccggagaaagtgaatttcagaaccatgcagcaacagcaaatgcaacagcaacagcaacagcaacagcagcagcagaataacagtacaggatcatcttctataatatattatgactcgtacatccacctggcatactcgcgtagtgtagataaagagtgggtttttgcagctctttcagatagctatggacaaggcagcatgacgaaaacgtggtacgtcgggaattccagaggaaaatttgacgacgcatgtaatcaaatatggaatatcgccctaaatttagcgtctaaaaaattcggaaaaatatgtctaattttaactagattgaatggcatactgccggatgatgaattgatgaattggaggagactttctggtaggaatatacatcttgctgtggtgtgtgtggatgacaactctaaaatctccttcatagatgaggacaaattgtaccctagtttcaagccgatctacaaagacactaggtttggaggacgcatggatatgaccagattatacgactatgaaataagggatatagaccaggacatccatggaatagtatttcagcacccgttcccactggcacactcacagcatcgctgtgctattaggagtggtgctttgatcaaattcaaaaaatgcgacggtgatacggtttgggacaaattcgcagtcaaccttttaaactgtccacattctgatagtacacaattgctggaaaccatcttagaagagtttcgcaacctggctgctctaaacgtgtggtacggtctctctgatggcgaagatggccatattccatggcatatcctagccgtgaaaaaaatgatgaacactcttgtgcacaccagagtaaaaattgctaatacttccgccgctactgtgcataccgctacttcttcatcaattattctctcggataaataa

SEQ ID NO: 197 - DNA, 1560 bp, Saccharomyces cerevisiae
atgccctctaccacgctactgtttccgcagaaacatattagggccattccaggcaagatatacgcgttcttcagagagctcgtcagcggagttattatatccaagccagatctaagtcatcattattcttgtgaaaatgcgacaaaggaggaaggcaaagatgcagcagatgaagaaaagactaccacaagtttgtttcccgaatcaaataatatagaccgttctttaaatggtggctgctctgtgatcccttgctccatggatgtcagcgatttgaacacgccaatatcgatcacactatctcctgagaatcgtatcaaatcagaagtaaatgccaagtcactgctcggatcaaggccagaacaagatacaggcgcccctatcaaaatgtctactggtgtcacaagctctccattaagtccatcaggctccaccccagaacattccaccaaggtcttgaacaacggcgaagaggagttcatttgtcactactgtgacgctactttcaggattagaggatatctaacgagacatattaagaagcacgccatcgaaaaggcgtatcactgtccattttttaacagtgccactcctcctgatcttagatgccacaattcgggtggttttagcagacgcgatacttataaaactcatttgaaggcaaggcacgtgctgtaccccaaaggtgttaaaccacaagaccgtaacaagtcgtccggccattgcgctcaatgtggtgaatacttttccaccattgaaaatttcgttgagaatcacattgagtctggggactgtaaagctttaccgcaggggtataccaagaaaaatgaaaaaagatctggaaaattaaggaagatcaagacatctaatggtcattctagattcatatccacttcgcaaagtgttgtagaacctaaagtacttttcaacaaggatgccgtagaggctatgaccatagtggctaataacagttcgggcaatgatattatatccaagtacggaaacaacaaattaatgttaaactcggaaaactttaaagtcgacatacccaagagaaagagaaaatatatcaagaaaaagcagcaacaggtatctggatcgacggtaaccacaccagaggtagctacacaaaacaatcaagaagtggcacctgatgaaatctcatccgccacaattttttcaccttttgatactcatctactcgagcccgtcccttctagttcatcggaatcttccgctgaagttatgttccatggcaagcaaatgaagaattttttgattgacataaacagcttcacaaatcaacagcagcaggcacaagataatccttcgttcctgccactcgatattgaacaatcttcatatgatttgagcgaagacgcaatgtcatatcccatcatatccacacaaagcaaccgtgattgcacgcagtatgataacacaaaaatctcacaaatcttacaatcacaactaaatccagaatatctcagcgaaaatcacatgagagagacacaacaatatttgaatttttacaatgacaactttgggtcacaattttga

SEQ ID NO: 198 - DNA, 3282 bp, Saccharomyces cerevisiae
atgccatttgatgttttgatatcaaaccaaaaagataataccaatcaccagaacatcacgccaatatcaaaatcagttcttttggcgcctcattcaaaccatccagtgattgaaatagctacgtattcagaaaccgatgtatacgaatgctatatacgtgggtttgaaactaaaatagtgatgagaagaactaaagatgattggattaatattacccaggttttcaaaatagctcaattttcgaagacgaaaagaactaaaatactggaaaaggaatcaaatgatatgcaacatgaaaaagttcaaggtgggtatggtaggtttcaaggtacttggatcccactggattcagcgaagtttttagtcaataagtacgaaataattgaccctgtggtcaactccatcttaacttttcaattcgatccaaataaccctccaccaaagagaagcaaaaatagtatattgaggaagacttcgccgggaacgaagataacttctccatcgagctacaataaaacaccaagaaaaaagaacagtagttcatcaacatcggctacaactacagctgcgaataagaaaggcaagaaaaatgcatcgatcaaccagccgaatccaagtcctttacaaaaccttgttttccaaactcctcaacagttccaagtaaattcatcaatgaatataatgaacaataatgataaccacaccacgatgaatttcaacaatgacacaagacacaatttaataaataatattagtaacaacagcaatcaatctactattattcaacaacaaaaatccattcatgaaaactctttcaataataattattcggcaactcagaaacctcttcaattttttccaattccgacaaatttacaaaacaagaacgttgctctgaataaccctaataataatgacagtaatagttacagccataacatcgacaatgtcattaacagcagtaataacaataataatggcaataataataacttgatcatagttccagacggacctatgcaaagccaacaacaacaacaacatcatcatgaatatttgacgaataacttcaatcattccatgatggactccattacaaatggcaatagtaaaaaaaggaggaaaaagctgaatcaatctaatgaacaacaattttacaaccagcaagaaaaaatacaaaggcatttcaaattaatgaagcaacccttattatggcaatcctttcaaaatccaaatgatcaccataatgagtactgtgacagtaacggcagcaacaataacaacaacactgtagcatccaatggctcctccattgaagtattttcatcaaatgaaaatgataacagtatgaatatgtcttcacgatctatgacaccgttcagcgcaggaaatacttcatctcaaaacaagttggaaaacaaaatgacagatcaagaatacaagcagacgatattaacaatactatcatcggaaaggtcttctgatgtagatcaagcgttgttggctactttatatccggcgcccaaaaattttaacataaattttgaaattgatgatcaaggtcacactccactccattgggctacagctatggcgaatattcctttgataaaaatgctaattaccttaaatgctaatgcattacagtgtaataagctcggttttaattgcatcacaaaatcaattttctacaacaattgctacaaggagaatgctttcgatgaaataatatccatcttaaaaatatgtcttataactcccgacgtaaatggaagattgccatttcattatttaattgaattgagcgttaataagtccaaaaatccaatgataataaaatcttatatggattcgataatattgagcttgggtcagcaggactacaatttgttgaagatatgtttgaactaccaagataatatagggaacactccactgcatttatctgctttaaacttgaacttcgaggtttacaacagactggtatatcttggtgcgtcaacagatatattgaatctagataacgaatcgcctgcgtcaataatgaataagtttaatactccggctggcgggtcaaacagcagaaacaacaacaccaaggcagatcgaaagttagctcgaaaccttcctcaaaagaattattaccaacaacagcaacagcaacagcaaccacaaaacaatgtcaaaattccaaaaattataaaaactcaacatcctgataaagaagattctactgcagatgtcaatatagctaaaacagattctgaagtcaacgaaagtcaatacctgcattccaaccagccaaattctacaaatatgaacactattatggaagacttgtcgaatattaattctttcgtgacgtcgtctgtcattaaagatataaagtctacgccgtccaaaattcttgaaaactctcccattttatacagaagaagatcacagtcaatatcagatgaaaaagaaaaggcaaaggataatgagaatcaagttgaaaagaaaaaggatcccttgaatagtgtgaaaactgccatgccatcattggaatcgccttcttcccttctgccgatacagatgtctccactaggaaagtactcaaaaccgctttcgcagcagatcaacaaattaaatacaaaagtttcttctctacaaagaataatgggtgaagaaattaaaaatctggacaacgaagtagtagaaaccgaatcctctatttctaacaataagaagagattgattacaatagcacatcaaatagaggatgctttcgattccgtatcaaacaaaactcccataaattcgatatcagatttacaatcaaggattaaagaaacatcgtcaaagttgaattctgaaaagcaaaattttattcaaagcttggaaaaatctcaagctttaaaactggctacaattgtccaggatgaggaatcaaaggttgatatgaatactaactcaagttcacatccagaaaaacaggaagatgaagagccaattccaaagtcaacgtcggaaacttcttctcctaaaaacaccaaagcggacgccaaattttctaatactgtacaagaatcatatgatgtaaatgagacgttgagactagcaacggaactaactattctacagtttaaaagaaggatgacaacattgaaaataagcgaagctaaaagcaaaattaattcatcggtgaagttagataaatacagaaacttgattggtatcacaattgagaacattgactcaaaattggacgatatagaaaaggatttgagggcaaacgcataa

SEQ ID NO: 199 - DNA, 876 bp, Saccharomyces cerevisiae
atgaactctattttagacagaaatgttagatctagcgaaactactttaattaaacctgaatctgaatttgataattggttgtcggatgaaaatgacggagctagtcatatcaacgtcaacaaggactcctcgtcagttctttctgcatcttcttccacatggttcgaaccattggaaaacattatctcctctgcatccagctcctcgataggctctccaatcgaagaccagtttatatcttccaacaacgaggaatctgctctttttccaacagatcagtttttcagtaatccttcctcatactcgcattctcccgaggttagcagctcgataaaaagagaagaggatgacaatgccctttcgttggcagattttgaaccggcttctttgcaattaatgcctaacatgataaatactgataataatgacgatagtaccccacttaagaatgaaatcgagctaaacgactcgtttataaaaacaaatctagatgctaaggaaacgaaaaagagggctccaagaaaaagactgacccccttccaaaagcaagctcacaacaagattgaaaaacgctacagaataaacatcaacacaaagattgcaagactgcagcagattatcccatgggtagcaagtgaacaaacagctttcgaagtaggtgattctgtaaaaaaacaggacgaagacggcgcagaaactgccgctactactcctcttccatctgccgctgctacaagcacgaagctaaataaaagcatgatcctagaaaaagctgttgactatattctatatctacaaaataacgaacgactatacgaaatggaagttcaaaggttgaaaagtgaaatcgacactttgaaacaagaccaaaaataa

SEQ ID NO: 200 - DNA, 1587 bp, Saccharomyces cerevisiae
atgaattatggcgtggagaagctgaaattgaaatattcgaagcatgggtgtattacttgcaagatcagaaagaagagatgctctgaagataaacctgtgtgccgggactgtcgtcgattaagttttccctgtatctatatatcagaatctgttgataagcagtctttgaaaaaaataaaggcagatatacagcaccagttgatcagcaagaaaagaaagcatgctcctgacagtgctcagaaagcggccgtggccacccgtactcgacgggtcggtagcgacgaacaggataaccaggtatatttgtcaaaaccgctggaagattgcatttctcagaagctggactctatgggattgcagctgtacaactactacaggtctcaccttgcaaacataatttccatcgcgcccatgaaccagaactactatctgaacattttcttgccaatggcccacgagaatgatggtatattgtttgctattcttgcttggtcagctaatcatttgtctatatcatcatcaaatgagctgcgaaaggatgaaatatttgtcaacttggcgaacaagtatacatacatgtcgttatcgcatctaaagacaaacgagggctcaagtgcctgtgctaaactggggtttctatattcactagcacaaatcctaatcttatgtggttcagagatatgtcagggtgatgtgaaattttggaagatattattgaatataggaaaaaatttgatcgaaaaccatgtgggcaaggatgtctcacggatactaaccactactacagaagaaccctccctagaggagaggataatcttccccaatttcaattccgttgttaagtactggctgattgtgaattttatatatcatgatattttgaatttcaatacaacgtccttcccgatcgaacaatacgagaaattcttccaaagggatcagaactctttacccagctcagccaactttattgagtcaatagactcgccaattgaggaaatagaccctttaattggcatcaacaagcctattttactactattgggacaagtcacaaatttgacgaggtttttgcagactatggaacaggaagaaatgctagagcatggcgataaaattttgagtttgcaagtcgagatttataaattacaaccttcgcttatggcgctggaacatttggatgatgaaaagaaattttactatttagaactattcgagataatgaaaatttctaccttaatgttctttcaattaactttattaaagattgacaaagattcgctggaactacagatactgagaaacaaattggactcgaagctagacaaggtcatcggaacttttttggaaggatcgttatgcttcccacttttcatttacggtgtatgcattcaggtagaagatatggagaaaaaaatagatttggaagccaaatttgacgacattttaaaacgatataaatgttacaatttccaaaatgctagattattgatacggaaaatttggcaaaacgaggctgatggcatcagtgagcatgacctggtccacatgattgacgaattagattacaatattaattttgcctga

SEQ ID NO: 201 - DNA, 2511 bp, Saccharomyces cerevisiae
atgctagacaaggcgcgctctcaaagcaaacacatggacgaatctaatgcggctgcctctctgctttcgatggaaacaaccgccaacaatcatcactatttgcacaataaaacatctcgtgccacgctgatgaatagcagccaagacggcaaaaaacatgcagaagatgaagttagtgatggagctaactcccgccatcctacaatttccagtgctagcatcgaatctctcaagacaacctacgatgaaaaccctttgctttctattatgaaatcgacatgtgcgcccaacaacactcccgtgcatactccgtctggttcgccgagtttgaaagtccaaagtggcggagatatcaaagacgatcctaaggaaaacgatactactactacgaccaatactacacttcaagatcgccgtgacagcgataacgctgtgcatgctgccgccagcccactcgcgccttccaatacaccttcggatcctaagtcattgtgcaatggccatgtcgcacaggctacagacccacaaatttccggtgctattcagccgcagtatactgcaaccaacgaggatgttttcccttactcctccacctccactaatagtaacactgccactactactatcgtcgccggcgccaaaaaaaaaatacatttgccgccaccacaagctccagcggtttcttcccccggtaccaccgcagcaggctcgggcgcgggcacgggctcgggcatccgttcccgcacaggatcggatttgccgctcatcattaccagcgccaacaagaacaacggtaagactaccaattcgcctatgtcgatactgagcagaaacaacagtaccaacaacaacgacaataattcgatacaaagctcagattcgagagaatcctctaataacaatgagattggcgggtatttgcgcggcggaactaagcgcggcggcagtccatctaacgactctcaggtccagcataatgtgcatgatgaccaatgtgccgtgggcgtggcgcccaggaacttctatttcaacaaggatagagagataacagacccaaatgtaaaactggacgagaacgaatcaaaaatcaacatatcgttctggctaaattcgaaatacagagatgaggcttattctttgaatgaatcatcctccaacaatgctagttcaaacacggatacgcctacaaactctcgacatgcgaacaccagctcttccattaccagcagaaacaatttccagcattttaggttcaaccaaataccttctcaacctccaacttccgcatcttcgtttacaagcacaaacaacaacaaccctcaacggaacaatatcaatcgcggtgaagacccgtttgccacttcgtcaagaccttctactgggtttttttacggcgatttgccgaatcgtaacaatagaaatagtcccttccatacaaatgaacaatacatcccaccacctccaccgaaatacatcaattctaaattggatggattgagatcaagattattgctcggtccgaattctgcatcttcatctaccaaactagacgacgacttgggtacagcagcagcagtgctatcaaacatgagatcatccccatatagaactcatgataaacccatttccaatgtcaatgacatgaataacacaaatgcgctcggtgtgccggctagtaggcctcattcgtcatcttttccatcaaagggtgtcttaagaccaattctgttacgtatccataattccgaacaacaacccattttcgaaagcaacaattctacagctgtttttgatgaagaccaggaccaaaatcaagacttgtctccttaccatttaaatctaaactctaaaaaggttttagatcccacttttgagtcaaggacaaggcaagttacttggaataagaatggtaagcgaatagacagacgcctttctgctccagaacaacaacagcaactggaagttccaccattgaaaaaatcgagaaggtcagttggaaacgcaagagtagcaagccaaaccaatagcgattataattctcttggcgaatcctcaacttcgtcagctccatcgtctccatctttgaaggcttcttctggcttggcatataccgctgattatcctaacgctacttcgccggatttcgctaaatctaaaggaaaaaatgtcaagcctaaggcaaaatcaaaggcgaaacagtcatcaaagaaaagaccaaataatactacttcgaaatcaaaagcaaacaattctcaagaatcgaataatgctacttcctcaacgtctcaaggtacaaggtcccgtactggttgctggatttgtagattaaggaaaaagaagtgtaccgaggaaagaccgcactgtttcaactgtgaaaggttgaaattggactgtcactatgacgcgttcaaaccagattttgtatctgatccaaagaaaaaacagatgaaactggaggaaatcaagaaaaaaacaaaagaggccaaaagaagagcaatgaaaaaaaaataa

SEQ ID NO: 202 - DNA, 1158 bp, Saccharomyces cerevisiae
atgtcacaagaaacaaaaatgctaccttctctatctagtcttctatcgggaaccgaaatctcgtccagccccgtatcaccaagcttcactaatccaagaacgagttttcacctcgatgatcgcggaaccataaaattaccaccgctaaacaccagtatcaatcgtccaagatctgtggaaagcgccttgagacacactgttacatccttgcatgaaaatagcagcgcttatggtgatgacatgctcaagcacacgcaatcagactcagccctctcatctcagttgaatagttctcaagaaacagttgatgaatcacacgaaaaccttctactgactcccctaaatagcaaaaagagagattattcggtttcttcaaagaaaaacgacatattaacaccactctctgcagcgaagtcgattattatcccctctgcctctaaggaaaaaagacgtgcatttgctttcatcacacactcgcaggagaccttccctaagaaggagcctaagatcgacaacgctccactagcacgccgaaagagaagaagaacctcgtcccaggaactatctattcttcaggctgaatttgaaaaatgtcctgctccatcgaaggagaaacgaattgagttagctgaatcttgccatatgactgaaaaagccgttcaaatatggttccagaataaaagacaagcggttaaaaggcagagaatcgccacttcgaagtcaaccactataatacaaacggtatctccaccatctccgcctctggacgttcatgctacgccactagcatccagagtcaaggcggacatacttcgtgatggaagctcatgttctcgttcttcctcttcttcaccgctggaaaatacgccgccaaggcctcatcattccctaaataggcgctcatccacaccaagcataaagagaagccaggctttaacattccatctaaacccacaaaagaagacgttgactcccgtgaaaacgtctcccaacagcagagtaaataaattgatcaatagcatagatcattctccatccaaagccaagcgtccggtaagcaatccctccggctcccctaaaaggaagagaaaattcggattcaagatcgtcgatcaacaaccgttgaaggatcttgatccgaacgctttccgtggttga

SEQ ID NO: 203 - DNA, 897 bp, Saccharomyces cerevisiae
atgagcggtgaattagcaaattacaaaagacttgagaaagtcggtgaaggtacatacggtgttgtttataaagcgttagacttaagacctggccaaggtcaaagagtagtcgcattgaagaaaataagactagagagtgaagacgagggtgttcccagtacagccatcagagaaatctcattattgaaggaattaaaagacgataatattgtcagattatacgatattgttcactctgatgcacacaagctatatcttgtttttgagttcctcgatttggacctgaaaagatatatggagggtattccaaaggaccaaccgttaggagctgatattgttaagaagtttatgatgcaactttgtaagggtattgcatactgccactcacaccgtattctgcatcgtgatttaaaaccgcagaacttattgattaacaaagatgggaatctaaaactaggtgattttggcttagcgcgtgcttttggtgttccgttgagagcttacacacatgaaattgttactctatggtatagagctccggaggtattactgggtggaaaacaatatagtacaggtgtcgatacatggtccatcggctgtatatttgccgaaatgtgtaacaggaaaccaatcttcagtggcgatagtgagatcgatcagattttcaagatattcagagtattgggaacgccgaatgaagctatatggccagatattgtctacttgcctgatttcaagccaagctttcctcaatggcgcagaaaagacctatcacaagtggtaccaagtctagatccacgcggtattgatttgttggacaaactcctcgcgtatgaccctattaaccggattagcgccagaagagcagccatccacccctacttccaagaatcataa

SEQ ID NO: 204 - DNA, 738 bp, Saccharomyces cerevisiae
atggctctacctctgataaaacctaaggagtctgaggaaagccacctcgctcttttgtccaagatccacgtgtccaaaaattggaaactgcctccaaggttgccccatagagcagctcagcggaggaaaagagttcatcgacttcacgaagattacgaaactgaagaaaatgatgaggagctacagaagaaaaaacggcagaatagagacgcccaaagggcctacagagaacgcaaaaacaacaagttgcaagtgctggaggaaaccatagagtcactgagtaaggtcgttaaaaactacgaaacgaaactaaaccgcctccaaaatgaacttcaagcgaaagaatcggaaaatcatgcccttaaacagaaattggagacccttactctgaaacaagcctctgtgcctgctcaggaccctatcctgcagaatttgatcgagaatttcaaaccaatgaaggcgatacctattaagtacaataccgctatcaagcgccaccagcactcgacagaactgcctagctctgtcaaatgcggcttttgtaacgacaacactacttgcgtttgtaaagaactggaaacagatcaccgtaaaagtgacgacggtgtggccacagaacagaaggatatgtcgatgccacatgcagagtgcaataataaagataaccccaatgggctctgtagtaattgtactaatatcgacaaatcatgtatcgacatccggtccatcatccactga

SEQ ID NO: 205 - DNA, 1152 bp, Saccharomyces cerevisiae
atgcaaaaccctccgttgattcgtcccgatatgtataatcagggaagcagctcaatggctacttataatgcctctgagaagaatctaaatgagcatccttctccgcaaattgcacagcccagcacgtcccaaaagttaccttatagaataaatcctacaaccactaatggggacaccgacatatctgttaacagcaatcctatccagcctcctttgccaaacttgatgcatctatctggtccgtctgactatagatcgatgcatcaaagtcctatacatccatcttatatcatccctccgcattcaaatgaaagaaaacaatcagcttcttacaacagacctcaaaatgctcatgttagtattcaaccttccgtggtattcccccctaaaagttattccatatcttatgcaccttatcaaataaatccccctttaccaaatggacttccgaaccagagcatatctttgaataaggagtatattgcagaggagcaactatcaaccctcccatctcgcaataccagtgttactactgcacctccttcttttcaaaacagtgctgataccgctaaaaattcagctgataataatgataataatgataatgtaaccaaacctgttcctgataaagacacccaactcataagtagttcaggcaaaactttaagaaatactagaagagctgctcaaaatagaaccgctcaaaaggcatttagacaaaggaaagaaaaatacatcaagaatctcgaacaaaaatcaaagatatttgacgatttactagcagaaaataataacttcaaatcattaaacgattcattaagaaatgacaacaacattttaatagctcagcatgaagctataaggaatgcaattactatgttaagaagtgagtatgatgtcttatgtaacgaaaacaacatgttgaagaatgagaatagtataataaaaaatgaacacaacatgtcaagaaatgaaaatgaaaacctaaaacttgagaataaacgcttccacgctgaatatatacgaatgatcgaggatattgaaaatactaaaagaaaggaacaagaacaacgagatgaaatagagcaactaaaaaaaaaaataagatccctggaggaaatagtagggagacactcggatagtgccacgtaa

SEQ ID NO: 206 - DNA, 1764 bp, Saccharomyces cerevisiae
atgtttactggtcaggagtatcattccgtagactctaattccaacaagcaaaaagacaacaataaacgtggtattgatgacacatcaaagatcttgaataataagataccgcactctgttagtgatacttctgccgccgccaccaccacttctactatgaacaattctgctttaagtagatccttagatcctactgacataaactatagcacaaatatggctggtgtggttgaccaaatacatgattatactacttccaatagaaattctttaaccccacaatattctattgcagctggaaacgtcaattcgcatgatcgggttgttaaacccagcgccaattcaaactatcagcaggctgcataccttcgacaacagcaacagcaggatcagcgacaacagtcaccctctatgaaaactgaagaggaatcccaactctacggtgatattctgatgaattctggtgtcgtacaggatatgcatcagaatctggccactcatacaaatctgagccaactgtcgtctacccgtaagtccgctccgaatgattctactacagccccgactaatgcgtccaacatcgccaatacggcttctgtgaacaagcagatgtatttcatgaacatgaatatgaataacaacccacatgccttgaacgatccatccatcctggaaacattgtcgccattttttcaaccttttggtgttgatgtagcacatttacctatgacgaatccaccaattttccaaagttctttgcctggatgcgatgagccaattagaagaagaagaatatcaatctctaacggtcaaataagccagctaggcgaagatattgaaactttggaaaacctgcacaacacacagccgcccccgatgcccaattttcacaattataatggtctgagccaaactaggaatgtatcaaacaagccggtcttcaaccaagcagtgccggttagtagtattccacaatacaatgcaaaaaaagttattaatcccacgaaggactccgcattgggtgatcagagcgttatttactcgaaaagtcagcagcgaaattttgtaaacgcgccatcaaagaatactccagcggagagtataagtgatttggaaggcatgacgacgtttgcgccaactactggaggtgaaaataggggcaaatctgcacttagggaatctcactctaatcctagcttcactccaaaatctcaaggatctcatttaaatttagcggcgaacacacagggaaatccaatccctggtactacggcatggaagagagcaagattgttagaaagaaatcgaattgcagcttcgaaatgtagacaaaggaaaaaggttgcgcagctgcagctccaaaaggaatttaacgaaattaaagacgagaatagaattttactgaaaaagttaaattactatgaaaaactaatctctaaattcaagaaattctccaaaattcatttacgtgaacatgaaaaactaaataaagactcagataataatgttaatggcactaatagtagcaacaaaaatgaaagcatgactgtggattcattaaagatcattgaagaacttttaatgatcgattcagacgttacagaagtggataaagatactggtaagatcatagccatcaagcacgagccatactctcaacgtttcggaagcgatactgacgatgacgatatagatctcaagcccgtagaaggtggtaaggatccagacaaccaatcattacccaattctgaaaagataaaataa

SEQ ID NO: 207 - DNA, 2811 bp, Saccharomyces cerevisiae
atggatggggaaatggcaataatagaaagcagcaatcatgtcgggacttcatcgcctaccactgaaacacagtttactatagattcttccgcattgaaagaccaagaaaccaaagaaagcataacaaattcaccgacaagcgaggtaccgattgaaacaaaactaccaaaaagttctgatatagtaacagaggaaaaacatcctcaaaacacgactactgatattgaaaacgaggtagagaatcctgttacagacgataatggaaatttgaaacttgaattacctgataaccttgataacgctgatttttcgaagctactggaatttgatgcaaaaaatgatgaagctctgttcaactcaaatgagttgttatcccacaccatggatcctgtaaataacatcgatttaactcatgatcacagcagggaggtttcatcaaaagaagatatcaatatagagccagtaaaccctgatgaggacgaaagggagaaaactcaagataacacagcagcagtgaaaactgaaggcataaggaactcagaagatacaagtatacaaaaggatgaacccactgctgatgctatatacacagatgtgcataaattatcagtaaacaaagataccgagaccctaccaacattagtagatgaaaaaaacaacatgctgcatatgagaaacaattcaataacgccaataatgtttcagcagcatgaattagtgggacaaccgccacaaaacactgtaacggaaaataatagtacagatgctgaaactacccaacgaaaactatctgagccaatcgatgcaagtttaccgctaccgaatgaacaaccgactatcttcgcctatgcaaggctggactttcaaagtttcacattttatgtacaaacattacatgcaataatcggaaggaggtctgagaatgacttctcccacaaagttgacgttaatcttggtccttcaaaatcaatatcgaggagacacgcccagattttttacaattttgggacaggaaggttcgaattgtccataatagggaagaatggtgcttttgtggatgacattttcgttgaaaaaggaaatactgtgccacttcgtaataagacaaaaattcaaattggacaaattccatttcaatttattttaccagaacaagaacgtaacgacgatagcaaaagcccagaaaacgctgacatagcagaatctgaaataaatacaagaaatctcaaaaaaaacgagcccaaatctaagaaaaagattacaactggagcaaagcccaagaaagcgcagaccaaaccagctgttaagaaagaaaagaagccaccgaaaataccaaagaaagtatatactttggaggagattccagtagaatatagaacgaaacctactgtatcttactctgctatgctaactacttgcatacgaaagtactcgactgccaagggaatgtctttatctgaaatttatgcaggaataagagaactcttcccctattataaatactgtcctgatgggtggcaaagctcggtaagacacaacttatcgctaaataaatctttcaggaaggtttctaaagaaggcaaaggatggttatggggtcttgatgaagaatatattgcagagagggaacgacagaaaaagaaacaaagtgagatagctgtggcaaaggcacaagctgcacaattaaaacttgaacagcaacagcacaaacttcagcaagtgccgcagaggggcaaaaaagatattgtttcgcagagatctaacgttaatgcgagaaaacaaaacatctcacaaactcttgcagcaaacagagccgcctcgaacaggaaaaatacagcaagtgataatcaaaggacaatgaaatatctgcaggaacagcttgtcattttaacacgagatagaaagggtttatcgaagcaggtcatcgctgcaattttgacgcaggctctagctatgacaataaatcaggttacacaagcggcaaaaaacaaggggattactggtaatccacttacagccttgatggacaagaatcctcagcatttgaatctaattttagcagctgctgtaaacgcggcaactgcaaaagtcacaaaaggtgaggtaaagcaattagtgaaccctgaaactacagcggcggcggctttagcagctaaggcacagcattccaaaccgatacgccaaccaatagtccagacgccgcatgtaccagataggcctccatctcagttatctgcgtcggcatcatcccatcccaataattacttgcatgataaacaaccgggatcgtttgatccttcgtccttgtctcgattttttcaaccgagacaaaatgctagggctacatcctctgtggcagctacgtcagttccggcggctgcttctcaaaatgttgatgcacaacccaaacctaagcctgcacaggacaacgacttagaaagtgaaagcggcactagtagtagtagcagttccagtagtgagagcggaagcgagagcgatagtggtagcgatgacggtagtgctagtggaagcggcgataatagcagcactagtagtgaaagcgaaagcgaaagtgatagtggaagcgaagtagatgaaaagaacaacaaaaacgaaaagatcgatagtgaaagtattaaaaacaacgaatctaaagatgatattccatctaaagacgagaatagtagcaatgataatcgcgagatttcaaaaaccgacgaagaaggtcatgattctaaaaggcggaaggtcagcgaggatatcaacgagggtatcactgaagtaaatgtatcccttgaggaaaaactttaa

SEQ ID NO: 208 - DNA, 846 bp, Saccharomyces cerevisiae
atgtccgaatatcagccaagtttatttgctttaaatccaatgggtttctcaccattggatggttctaaatcaaccaacgaaaatgtatctgcttccacttctactgccaaaccaatggttggccaattgatttttgataaattcatcaagactgaagaggatccaattatcaaacaggataccccttcgaaccttgattttgattttgctcttccacaaacggcaactgcacctgatgccaagaccgttttgccaattccggagctagatgacgctgtagtggaatctttcttttcgtcaagcactgattcaactccaatgtttgagtatgaaaacctagaagacaactctaaagaatggacatccttgtttgacaatgacattccagttaccactgacgatgtttcattggctgataaggcaattgaatccactgaagaagtttctctggtaccatccaatctggaagtctcgacaacttcattcttacccactcctgttctagaagatgctaaactgactcaaacaagaaaggttaagaaaccaaattcagtcgttaagaagtcacatcatgttggaaaggatgacgaatcgagactggatcatctaggtgttgttgcttacaaccgcaaacagcgttcgattccactttctccaattgtgcccgaatccagtgatcctgctgctctaaaacgtgctagaaacactgaagccgccaggcgttctcgtgcgagaaagttgcaaagaatgaaacaacttgaagacaaggttgaagaattgctttcgaaaaattatcacttggaaaatgaggttgccagattaaagaaattagttggcgaacgctga

SEQ ID NO: 209 - DNA, 2661 bp, Saccharomyces cerevisiae
atggaaggaagatcagattttgtggcgacttcacagtccggaagtgaaatgagccatagtgaaactaggaatagaactgggatgaatgctaggaaaaggaaattcgcctgtgtggaatgtcgtcagcagaagtcgaaatgtgatgctcacgaaagagcaccggagccatgcactaagtgtgctaaaaagaatgtcccatgcattttaaaacgagatttcagaagaacttataaaagagcaaggaacgaagccattgaaaaaagattcaaggaactcaccagaactttgacaaatttaacttcggatgaaattttgaagaaaattgaagaggaacaggaaattgttttggataacagtaatttcacaaaagaaaaagtaaaacaactcaggaagagtgcttttgagacgacagaaatagaaccgagatcatacaaaacacttcgaggagaacctatttcttacagtaccaacagaagacatacggattcttctcctttaacgctcttaagctcgtcgacaaacttcgaccctgttcactcaacaaacgttatgacagatgatcaacttaagtgcttgccaaaaagcctgggcgacgtatatttgtcaagcagcgatattgctgagctgtttcaagaatttgcgacaaaatatcatcaatttttacccgtcgttgacctttcgaaaggagcagagcgaatttatcacttatctccttgcttattctgggtcatcctgctcattggtttaaggcggaaatttggggctacagacttaatgactcgattatcagtgctagtaaagtcagttttatcagaaatcacaatatctccaataattcgatatactccatcagataaggacgaacccgttctaaatgtagcatctgtatattccgtgcaagcatttcttttatacacgttctggcctcccttaacctcttcattaagcgccgacacttcgtggaataccataggaacagcgatgttccaagcgcttcgggtaggactaaattgtgcaggtttttcaaaagagtatgcttcggcaaattcagaattagttaacgagcaaatacgaacttggatttgctgcaatgttgtatctcaaacagttgcatcatcatttggtttcccagcttatgtttcatttgattatttagtaatcagctctattagagtaccaaattcaaaaagccaagtagatatacccaatgaactaagacaaatggctcaaattgctagatttgagaaccaaatcgtaaacacaatgaactccaccccggcgagtgttactgggatggtaagtcaggaagagaagcagcccttgttacacgttcttaatcaacaactaagtcaattggagattagtcttgaagaaaataacctagatgatatccgaaaatttttattactagtggccaaggttcacttattaacctattacttcactgatgttacctcccaaagtgctggaaaatcaaatggtaatatttatgagggatcatattccattatggaactcgatacaagttttgaaacgaaacgtggattggtgaaagtttataatgccgccgtaaactttcttatacatgccaatagtatgtgggaacatgatcctaccattattaagtactttcctggtttgtttgtcttgaatatatggcaatctgcctgtattattagtaaactcatacattcatcacttcattcaatgctagatgttaactcaggcaaaaaagcttataacaacgcaatttcattgacgtttaatgcctcagttttaaaatatgatatggcgtacagatcatccggaataatgcgaagcatatggagtttatttgctaatatgtatgatgcctggaaaaacgaccaaaaggaaggtggaggtagactaaataatgatttcaatttaggcatcaccataaaatctaggatgtcagtaaacgttttttttgactgcttatatattctaaaagagaaatgtggtatggccaaattggagagagagaccaaggtttctacagcttacaatgttgatgaagaggaagaggaagatgaagatgaggagggagaagaagaagaagaagaagaagaactaagtagtaaagttccagaaaatatggatagccagcaactaaggacaaggaaattcaccaatgtaaggcatccagaaaagaaagcaagaaaaataattgaaacaattccgctagacccaaatccaataaatgcaggctctaccagcagtggaagctcattaacgaccccaaatagtcaagtagcgaacactatatcatatagaggaatcctcaataaaatgtcacctagggaacaactgaatcatgcaaatttagattccagtgtttctacagacatcaaggacactgaagctgtcaatgaacctctgccaatagggaggaatgctgaacatccggcaaatcaaccgcctctttcaataacacaaatgcaagaaaacacactacctgcgacacaagccaactcttctctattagaaacgtatcccattgttcaatcaaaccccgttacaactacaatcaaagaatcacccaattccatcatggcaggttgggataactgggaatctgatatggtttggagggatgttgatattttaatgaatgaatttgcgttcaatcccaaggtttaa

SEQ ID NO: 210 - DNA, 534 bp, Saccharomyces cerevisiae
atgaaactggcgcaagacatgaatgtagatgaaatatttctcaaacaagcggcagaagctatagcggtaatctcatcaagtcccactcatacggaccccataatacgagagctactccacagaattcgacaatccagcccattgagcgcagttataccagcaccagaaaatgttttaaaggctggggagccggaaaatatggctagaggtcttataaggattccagaaacacaaacaaaaagaacaggaggtaacaaccatagcaaggaaggcgcacagctctacagctgtgcgaaatgtcagttgaaattcagcagaagttctgatctgagaagacatgaaaaggtacactcactcgtgctgccgcatatttgctcaaactgtggcaaagggtttgccaggaaggatgctctaaaaagacattctaacacactgacctgtcaaagaaacagaaagaaactaagtgaaggttcagacgttgatgtagatgagctcatcaaggatgcgataaagaatggtaccggcctgttgtaa

SEQ ID NO: 211 - DNA, 1233 bp, Saccharomyces cerevisiae
atgagtacagccgatcaagaacaacccaaagtggtggaagcgacaccagaagatgggacagcttcctcccaaaagtcaactataaacgctgagaatgaaaatacaaaacaaaatcaaagtatggaaccccaagaaacttcaaaaggtacctccaatgatactaaagacccagataacggagaaaagaacgaggaagccgcaatagacgaaaatagtaacgtagaagctgcagaaaggaaacgtaagcacattagcacagatttctcagatgacgacctagaaaaggaggagcataatgatcagagtcttcaaccaacggtggaaaatagggctagtaaagatagagattcaagtgctactccaagtagtagacaggaattggaagaaaaactggaccgtatattgaaaaaaccaaaggttagaagaacgaggagggatgaagacgatttagaacagtacttggatgaaaaaattctaaggcttaaagacgaaatgaatattgcagcacagttggacatcgatactttaaataagagaatagaaactggagatacttcgctgattgccatgcagaaggtcaaattgttgccgaaggtggtaagcgtactgtcaaaggcaaacttggcagacaccattttggataataacttacttcaaagtgtcagaatatggttggaacccttacctgatgggtctctgccatcttttgagattcaaaagtcactctttgcagctttaaacgatctaccagtgaaaactgaacacctgaaggagagtggtttggggagagtagttatcttttatacaaagtccaagcgtgtcgaagctcaactagctaggttggctgaaaaattaattgcggagtggacaagacctattattggtgcttcagataactacagagataagagaataatgcaattagagtttgattctgaaaaattgagaaagaaatccgttatggattctgccaaaaataggaaaaagaaatctaagtctggtgaagatcctacctctcgtggttcttcggtacaaaccttgtacgaacaagctgctgcaaggagaaacagggctgccgcaccagcacaaaccactactgattacaagtatgctcctgtgagtaaccttagcgcagtacctacaaacgcaagagcagttggtgttggttccactttaaacaatagtgagatgtacaagaggttgacttcaagattaaacaagaagcataaataa

SEQ ID NO: 212 - DNA, 4356 bp, Saccharomyces cerevisiae
atggaagagacgggagattcgaagctggtccctagggacgaggaagaaatagtaaatgacaacgatgaaactaaagcgcctagtgaggaagaagaaggagaagatgtctttgactcctctgaggaagacgaagatattgatgaagacgaagatgaggcaagaaaagtgcaagaaggcttcattgtcaacgatgatgatgaaaatgaagacccaggaacaagtatttccaaaaaaagaagaaaacataaaagaagagaaagagaagaagatgatcgactatccgaagatgatttggatttgttaatggagaatgctggtgttgaacgtaccaaagcgagctcctcttcaggaaaatttaaaagattaaagagagtaggagatgaaggaaacgctgcagaatcagaaagtgacaacgtcgctgcatcaaggcaagattctacgtctaaattggaagatttcttttctgaagatgaagaagaagaagaatctggtttacgcaacggtaggaacaatgaatatgggcgtgatgaagaagaccatgaaaataggaacagaacagctgacaaaggtggaatcttggacgaattggatgatttcattgaagatgatgaattttctgatgaggacgacgaaaccagacaaaggaggatccaagaaaagaagcttttaagagaacaatccatcaaacaacctacacagattactggtctatcgtcggataagattgacgagatgtatgacatttttggtgatggtcatgactacgattgggctttagaaattgaaaatgaagaactagaaaatggtaacgacaacaatgaagctgaagaagaagagatcgatgaagaaactggtgctataaaaagcaccaagaaaaagatatctctacaagacatttatgatttagaggatttgaaaaaaaacttgatgactgaaggagacatgaaaattagaaagacagatattccagaaagatatcaagaattaagagcaggtattactgactacggaaatatgtcatcggaggatcaagaattagaaagaaactggatagcagaaaaaatttctgtggataagaacttcgatgccaattatgatctcactgaatttaaagaagcaattgggaacgcaatcaaatttatcaccaaagaaaacttggaagtcccttttatatatgcttaccgtcgtaactatatttcctcaagagaaaaagatgggtttcttttgactgaagatgacctttgggatatagttagccttgacatcgaatttcacagtcttgtgaacaaaaaggattatgtccagagattttatgcagaattacatatcgatgatcctattgtcactgaatacttcaaaaatcagaatactgcatctattgcggaactgaattctctacaggatatttatgactacctagaattcaaatatgccaacgaaatcaatgaaatgtttataaaccacactggaaagactggtaagaaacatttgaaaaattccagttatgaaaaatttaaagctagtcctctttatcaagcggttagtgatattggtatatcagctgaggatgttggtgaaaatatcagttcccagcatcaaatccaccctcccgtagatcatccaagttccaaaccagtagaagtgatagaatctatattgaatgcaaacagcggtgatttgcaagtctttacgtccaatactaagctggcaattgatacggtccaaaaatactactctttggaattgtctaaaaatacaaaaataagggaaaaagttagatccgatttttccaaatattatctggctgacgttgtgttaactgctaaaggtaaaaaagaaattcaaaagggatctctgtatgaggacataaaatatgccatcaatagaactccaatgcacttccgtagggatccagacgtttttttgaaaatggtcgaggctgagtctttgaacctgctcagtgttaagttacacatgtcgtcacaagcccaatatatagagcatttattccaaattgcacttgaaactaccaatacctcggacatcgcaatagaatggaataacttccgtaaactggcattcaaccaagcgatggacaagattttccaggatatatctcaagaagtcaaagacaatttaacaaaaaattgtcaaaaattggtagccaagactgttcgccataagtttatgacaaaattagaccaggctccattcattcctaatgtcagggatccaaaaattccaaaaatcttatctttaacctgtggacagggtagattcggagccgacgctataattgctgtctacgtcaacagaaagggtgattttataagagattacaagattgtcgacaatccatttgataagacgaatcctgaaaaatttgaagacaccttggataatatcattcaaagctgtcaaccgaatgccatcggaatcaatggccctaacccaaagactcaaaaattttacaaaagattacaagaagttctacataagaagcaaatcgtcgacagtagaggacatactattccaatcatttacgttgaggacgaagtcgctatccgttatcagaattccgaaagagctgctcaagaattccctaataaacctcctctagttaaatactgtatcgccttggcgcgctatatgcattccccattgttggaatatgctaatttaacaagtgaagaagtgagatcattgtcaattcatccacaccaaaatctgttatcctcagaacaattgagttgggctcttgaaaccgctttcgttgatattgtcaacctggtaagtgttgaagttaacaaagccacagataataattactacgctagtgcgctgaaatacatctctggctttggaaaacgtaaagctattgatttcttacagtcccttcaaaggctaaatgaaccattactggctcgtcaacaattaattactcataacattcttcacaagactatttttatgaattccgcgggattcctctatatctcatggaatgaaaaaagacaaaaatacgaagatttggaacatgatcaactagatagcactagaattcatccagaagactaccatttggccaccaaggttgccgctgatgctttagaatacgatcctgatactattgccgaaaaagaagaacaggggactatgagtgaattcattgaactgttgagagaagatcctgaccgtagagctaaactagaatcactaaatctagaatcatacgcagaagaacttgagaagaataccggattaagaaaacttaataatctaaatacaattgtccttgaattgttggatggatttgaagaattgagaaatgactttcatcctttgcaaggtgatgaaattttccaaagtttgactggtgagtctgaaaagacgtttttcaagggtagtattattccagtcagagtagaaagattctggcacaacgatataatttgcactacaaactctgaagttgaatgtgtagtaaatgctcaacgtcacgcaggtgcacaattaagaagacctgcaaatgaaatatacgaaattggtaaaacatatccagcaaaggtgatatatattgactatgctaatattactgcagaagtttccttattagatcatgatgtcaaacagcaatatgttccaataagctacagtaaagatccttccatttgggacttgaaacaagaactggaagatgccgaagaggagaggaaattgatgatggcagaagcccgtgcaaagagaacacatcgtgttatcaatcatccttactatttccctttcaacggcagacaggctgaggattacttaaggagtaaagaacgtggtgaattcgtgatcagacagtctagccgaggtgatgaccacttggttatcacctggaaattggataaggatttgtttcaacatattgatatccaagaattagaaaaagaaaatcctttggctttaggtaaagtcttgattgtcgacaatcagaaatacaatgatttagaccagatcattgtagaatatcttcaaaacaaggtaaggctcttgaatgaaatgacatctagtgaaaaattcaaaagcggtactaagaaagatgtggtcaagtttattgaagactactctagagtgaatccaaataagtctgtgtactatttcagtttgaaccacgataaccctggttggttttacttgatgttcaagattaacgcaaatagcaaattatacacatggaatgtgaaattaacgaacactggttatttcctggtaaactacaattatccaagtgttatccagctttgtaatggttttaagacgcttctaaaatctaacagtagtaagaatagaatgaacaactaccgttag

SEQ ID NO: 213 - DNA, 1308 bp, Saccharomyces cerevisiae
atggtggtgaacacgatatatatcgcaaggcatggatacagatccaactggcttccggagggtccatatcctgacccacttacaggaattgatagcgatgttcctttagcagaacacggagtccagcaagccaaagagttggcccattaccttttgtccttggataatcaaccagaggccgccttcgcttctccattttatagatgtcttgagactgtacaaccgatagctaagctgttagaaatacctgtttatctagaaaggggtatcggggaatggtatagacctgatagaaaacctgttattccagtacctgctggatatgagatactaagcaaattttttccaggtgtcattagccaagaatgggactctacattaacaccaaatgaaaagggtgagacagaacaggagatgtatatgagattcaaaaaattttggcccttatttattgaacgtgtagaaaaggaatatccaaatgttgagtgcatactgttggtcacacacgctgcatctaagattgcccttggaatgagcttgctgggatacgataatcctcggatgtctttgaatgaaaatggtgataaaataagaagtggtagttgctcattagacaaatacgaaattcttaaaaaaagctacgatactatagatgaaactgatgatcaaacatcctttacctatataccatttagtgacagaaaatgggttttaacgatgaatgggaataccgagtttttgagtagtggtgaagaaatgaattggaattttgattgtgtggcagaagctggttcagatgctgatatcaaaaagagacaaatgacaaaaaaaaccagctcaccaataccagaagcagatgatcaaacggaagtagaaaccgtttatatcagtgttgatattcccagcggcaattacaaagagaggaccgagatagcaaagagcgcaattttacaatattccggtttagaaacagatgctccgttgtttagaatcggaaatagattgtatgagggaagctgggagagacttgttggcacggagcttgctttcccaaatgctgcacatgtacataaaaagacagccggtctactatcaccgactgaagagaatgaaacaacaaatgctggtcaaagtaaaggctcatcgactgccaacgacccaaacatacaaatacaagaagaagacgttggactaccggattcaactaacacaagtagagatcacacgggagataaagaagaggttcaatcagaaaagatttatagaataaaagagaggatagtgctaagcaatgtccgccctatgtaa

SEQ ID NO: 214 - DNA, 2142 bp, Saccharomyces cerevisiae
atgactgccagcgtttcgaatacgcagaataagctgaatgagcttctcgatgccatcagacaggagtttctccaagtctcacaagaggcaaatacctaccgtcttcaaaaccaaaaggattacgatttcaaaatgaaccagcagctggctgagatgcagcagataagaaacaccgtctacgaactggaactaactcacaggaaaatgaaggacgcgtacgaagaagagatcaagcacttgaaactagggctggagcaaagagaccatcaaattgcatctttgaccgtccagcaacagcggcaacagcaacagcagcaacaggtccagcagcatttacaacagcaacagcagcagctagccgctgcatctgcatctgttccagttgcgcaacaaccaccggctactacttcggccaccgccactccagcagcaaacacaactactggttcgccatcggccttcccagtacaagctagccgtcctaatctggttggctcacagttgcctaccaccactttgcctgtggtgtcctcaaacgcccaacaacaactaccacaacagcaactgcaacagcagcaacttcaacaacagcaaccacctccccaggtttccgtggcaccattgagtaacacagccatcaacggatctcctacttctaaagagaccactactttaccctctgtcaaggcacctgaatctacgttgaaagaaactgaaccggaaaataataatacctcgaagataaatgacaccggatccgccaccacggccaccactaccaccgcaactgaaactgaaatcaaacctaaggaggaagacgccaccccggctagtttgcaccaggatcactacttagtcccttataatcaaagagcaaaccactctaaacctatcccacctttccttttggatctagattcccagtctgttcccgatgctctgaagaagcaaacaaatgattattatattttatacaacccggcactaccaagagaaattgacgttgagttacacaaatctttggatcatacttcagttgtttgttgcgtgaagttcagtaacgatggtgaatacttagccacaggctgcaacaaaactactcaagtgtatcgcgtttcagatggttctctggtggcccgtctatctgacgattctgctgccaataaccatcgaaattcgatcactgaaaataacaccaccacgtccacggataacaatacaatgacaaccactactaccaccacaattactaccacagcgatgacttcggcagcagaattggcaaaagatgtggaaaacctgaacacttcgtcttccccatcatccgacttgtatatccgttcagtgtgtttttctccagatgggaaatttttggcaacaggtgctgaagacagactgattagaatttgggatattgaaaatagaaagattgttatgattcttcaaggccacgaacaagatatttattcattggactactttccctcaggtgacaaattagtctccggttctggtgaccgtaccgttcgtatttgggacttacgtacaggccagtgttcattgactttatccattgaagatggtgttaccaccgtcgctgtatcaccaggtgatggtaaatacatcgctgctggttctctagatcgtgctgtgagagtttgggattccgagaccggattcttggtggaaagactagattcggaaaacgaatccggtacaggccacaaggactctgtttatagcgttgtcttcactagagatggacaaagcgttgtatccggctcattagatagatctgttaagctctggaatttgcagaatgcaaacaacaagagcgattcgaaaactccaaattccggcacttgtgaagttacgtatatcgggcataaagactttgtattgtccgtggccaccacacaaaatgatgagtacatcttgtccggttccaaagatcgtggtgtcctgttttgggataagaaatccggcaatccgttattgatgttgcaaggtcataggaattcagttatatctgtggctgtggcaaacgggtctccgctgggtccagaatataacgtttttgctactggtagcggtgattgtaaagcaaggatttggaagtataaaaaaatagcgccaaattaa

SEQ ID NO: 215 - DNA, 1314 bp, Saccharomyces cerevisiae
atgccaaaaaaggtttggaaatcatctacgccttccacttatgaacatatctccagcttaagaccaaaatttgtgtctcgtgtggacaatgttctgcaccaaaggaagtccttgacgttcagcaacgttgttgttccagataaaaaaaataacactctaacctcaagtgttatatactctcaaggtagtgatatctacgaaattgacttcgctgtaccactacaagaagccgcttcagaaccggtgaaagactatggtgacgcctttgaaggtattgaaaacacctcgttgagcccaaaattcgtgtaccagggtgaaactgtctccaaaatggcctacttagataagactggagaaactacattattgtcgatgtctaagaacgggtcgttggcttggttcaaagagggtataaaggtccctattcacattgtacaggaattgatgggtccagcaaccagctatgccagcatccattctttaaccagacctggtgatctacctgaaaaggatttctcattagccatctctgacttcggcatttccaatgataccgaaaccattgtgaagtctcagagtaatggtgatgaagaagacagtattttgaaaatcattgacaatgccggtaagcctggtgagattctacgtactgttcatgtgcctggtaccactgtgactcacaccgtaagatttttcgacaatcatatctttgcgtcttgttcagatgacaatattctgaggttctgggacactagaacttccgacaagcctatatgggtgttgggagaaccaaagaacggaaaattgacctcgtttgattgctctcaggtttccaacaacttgtttgttaccggtttcagtacgggtattatcaagttatgggatgccagagcggctgaagctgccaccactgatttgacttatagacaaaacggtgaagatccaattcagaatgaaatcgctaacttctatcatgccggcggtgattctgttgtcgacgtccaattttctgccacttcaagctctgaattctttactgtgggcggcactggtaatatttaccactggaacactgactattccttgtcaaagtacaatcctgacgataccattgctcctcctcaagatgccactgaagaatcacaaacaaaatctctgagattcttgcacaagggtggaagcagaagatctccaaaacagattggaagaagaaacaccgccgcttggcatccagttattgaaaacttggttggtactgtcgatgacgatagtttagtcagcatctacaagccctataccgaggaaagcgaatag

SEQ ID NO: 216 - DNA, 1953 bp, Saccharomyces cerevisiae
atgagtgtgtctaccgccaagaggtcgctggatgtcgtttctccgggttcattagcggagtttgagggttcaaaatctcgtcacgatgaaatagaaaatgaacatagacgtactggtacacgtgatggcgaggatagcgagcaaccgaagaagaagggtagcaaaactagcaaaaagcaagatttggatcctgaaactaagcagaagaggactgcccaaaatcgggccgctcaaagagcttttagggaacgtaaggagaggaagatgaaggaattggagaagaaggtacaaagtttagagagtattcagcagcaaaatgaagtggaagctacttttttgagggaccagttaatcactctggtgaatgagttaaaaaaatatagaccagagacaagaaatgactcaaaagtgctggaatatttagcaaggcgagatcctaatttgcatttttcaaaaaataacgttaaccacagcaatagcgagccaattgacacacccaatgatgacatacaagaaaatgttaaacaaaagatgaatttcacgtttcaatatccgcttgataacgacaacgacaacgacaacagtaaaaatgtggggaaacaattaccttcaccaaatgatccaagtcattcggctcctatgcctataaatcagacacaaaagaaattaagtgacgctacagattcctccagcgctactttggattccctttcaaatagtaacgatgttcttaataacacaccaaactcctccacttcgatggattggttagataatgtaatatatactaacaggtttgtgtcaggtgatgatggcagcaatagtaaaactaagaatttagacagtaatatgttttctaatgactttaattttgaaaaccaatttgatgaacaagtttcggagttttgttcgaaaatgaaccaggtatgtggaacaaggcaatgtcccattcccaagaaacccatctcggctcttgataaagaagttttcgcgtcatcttctatactaagttcaaattctcctgctttaacaaatacttgggaatcacattctaatattacagataatactcctgctaatgtcattgctactgatgctactaaatatgaaaattccttctccggttttggccgacttggtttcgatatgagtgccaatcattacgtcgtgaatgataatagcactggtagcactgatagcactggtagcactggcaataagaacaaaaagaacaataataatagcgatgatgtactcccattcatatccgagtcaccgtttgatatgaaccaagttactaatttttttagtccgggatctaccggcatcggcaataatgctgcctctaacaccaatcccagcctactgcaaagcagcaaagaggatataccttttatcaacgcaaatctggctttcccagacgacaattcaactaatattcaattacaacctttctctgaatctcaatctcaaaataagtttgactacgacatgttttttagagattcatcgaaggaaggtaacaatttatttggagagtttttagaggatgacgatgatgacaaaaaagccgctaatatgtcagacgatgagtcaagtttaatcaagaaccagttaattaacgaagaaccagagcttccgaaacaatatctacaatcggtaccaggaaatgaaagcgaaatctcacaaaaaaatggcagtagtttacagaatgctgacaaaatcaataatggcaatgataacgataatgataatgatgtcgttccatctaaggaaggctctttactaaggtgttcggaaatttgggatagaataacaacacatccgaaatactcagatattgatgtcgatggtttatgttccgagctaatggcaaaggcaaaatgttcagaaagaggggttgtcatcaatgcagaagacgttcaattagctttgaataagcatatgaactaa

SEQ ID NO: 217 - DNA, 1152 bp, Saccharomyces cerevisiae; identical to SEQ ID NO: 205

SEQ ID NO: 218 - DNA, 1230 bp, Saccharomyces cerevisiae
atgggcaatatccttcggaaaggtcagcaaatatatttagcaggtgacatgaagaagcaaatgttgctaaataaagatggaacacctaagaggaaggtgggcagaccaggcagaaaaaggattgactctgaagctaagagtaggaggactgcccagaatagggcagctcaacgagcgttccgagataggaaagaagccaaaatgaagagtttgcaagagagggtagagttactagaacagaaagatgcgcagaataagactaccacggactttttactatgttctttaaaaagtttactgtcggaaattacaaaatatagagctaagaattctgatgatgaaagaatattagccttcctcgatgatctgcaagaacaacagaaaagggaaaacgaaaaaggaacaagtacagcagttagcaaggctgcaaaggaattgccatcgcctaattcagatgaaaacatgactgtgaacacaagtatagaagtacagccgcacactcaagagaatgagaaagttatgtggaacataggctcatggaacgctcccagtttaaccaattcgtgggattctccccccggaaatcgaacaggtgccgttaccatcggtgacgaaagtattaatggtagtgaaatgccagatttcagtctcgatcttgtctccaatgatagacagactggtctagaagctttagattacgacattcataactactttcctcagcactctgaacgcctgaccgctgaaaaaatagatacgtcagcatgtcaatgtgaaattgaccaaaagtatcttccatacgagacagaagatgatactttattccccagcgtgcttccccttgctgtagggagccagtgtaataatatttgcaaccgcaagtgtatcgggaccaaaccatgttcaaataaggagatcaaatgcgacttaataacaagccacctgttgaatcagaaatctctagcttcggtgcttccggtggctgcttctcatactaaaacaattcgaacccaatctgaagcaattgaacacattagcagcgccatatcgaatggaaaagcgtcttgctaccacattctcgaagagatctcctccctaccaaaatattcatcgttggacatagatgatttatgcagcgaattaataatcaaggcaaaatgtacagatgactgcaaaatagtagtcaaagctcgcgacttacagagtgctctggttagacagctcctgtag

SEQ ID NO: 219 - DNA, 1944 bp, Saccharomyces cerevisiae
atgaaatatcccgcttttagcattaacagtgacacggtacacttaacggacaaccccctggacgactatcagcgtctctacctcgtcagcgtactggatagggactcgccgccggccagtttcagcgccggactcaatattagaaaggttaactataaatcctccattgctgcgcagttcacacatccaaacttcattatcagtgctcgggacgcagggaacggggaagaggcggcggcgcagaacgttctgaactgcttcgagtaccagtttcccaacctacaaacaattcagagcctagtccacgaacaaacgttgctatcgcagctcgctagctccgccactcctcactccgccttgcatctgcacgataaaaatattctgatgggtaagatcatactaccttcccggtctaacaaaacaccagtctcagcatcacccaccaagcaagaaaagaaggctctgtcaacagcatcgcgtgaaaatgccacctcctcgctgacaaagaatcagcagttcaagttgaccaaaatggaccataatctgatcaatgacaagctcatcaaccctaacaactgcgtaatatggtcgcatgactccggctatgtgttcatgacgggcatctggcggctgtatcaggatgttatgaaggggcttataaacttgcccagaggtgacagcgtttccactagccaacagcagttcttttgcaaggctgaattcgagaaaattctatctttttgcttttacaatcacagttcgttcacttctgaggaatcttcaagcgtactgttgtcgtcctccacctcttcgccgccaaagagacggacatccacagggtctaccttcttggacgccaatgcgtcttcttcatctacttcttcaacgcaggcaaacaattacatcgattttcattggaacaacatcaagcccgaactgcgggaccttatttgccagtcttacaaagacttcctgatcaatgaacttggtcctgaccaaatagacttgcccaacttaaatccggcaaattttacgaaaagaataagaggtggttacatcaaaattcagggtacttggttgccgatggaaatctcaaggttgctatgcctgcggttttgttttccgatcagatactttctggtgcctatttttggtccagatttccccaaagattgcgaatcgtggtatttggctcatcaaaacgttacatttgctagttctaccactggtgcaggtgctgctactgctgctactgctgctgctaatacaagtaccaattttacgtctactgcagtggcaagacctaggcagaagcccagacccaggccaagacaaagatctacttccatgtcccattccaaagcgcagaaacttgttattgaggacgccttgccctcattcgactcatttgtagaaaacttgggcctttcctcaaatgacaagaacttcattaaaaaaaacagcaaaaggcaaaagtcgtccacatacacctctcaaacttcttctccaatagggccaagagatccaacggtgcaaattttgtcaaacctagcatccttctacaacacccacggtcaccggtattcatatccgggaaatatctatataccacagcaaagatactctttacccccaccaaaccagctctcgtcgccacagcggcagctaaactatacttacgaccacattcacccagttccttctcagtaccagtctccaagacactacaacgtcccctcttcaccaatcgcgcctgctcctcccactttccctcaaccttatggtgatgatcactatcattttttgaaatatgctagcgaagtttataagcaacaaaaccaacgaccagctcataatacaaataccaatatggacacctctttttcgccaagggcgaacaattcactgaacaatttcaaatttaaaacaaactcaaaacaataa

SEQ ID NO: 220 - DNA, 2193 bp, Saccharomyces cerevisiae
atgcaagacgaccccgaaaattcgaagctgtacgacctgctgaatagtcatctggacgtgcatggtcgaagtaatgaagagccgagacaaactggtgacagtaggagccagagtagtggcaacaccggtgaaaacgaggaggatatagcatttgccagtggattaaacggcggcacattcgactcaatgctggaggcactgcccgatgatttatattttacggacttcgtgtctccttttacagcagctgccacgaccagcgtgactactaagacggtcaaggacaccacaccagctaccaatcatatggatgatgatattgcgatgtttgattcacttgccacaactcagcccatcgacatagccgcatccaaccaacaaaatggtgaaattgcacaactttgggactttaacgtggaccaattcaacatgacgcccagcaactcgagcggttcagctactattagtgctcctaacagctttacttccgacataccgcaatacaaccacggttccctcggcaacagcgtctccaaatcctcactgttcccgtataattccagcacgtccaacagcaacatcaaccagccatctatcaataacaactcaaatactaatgcgcagtcccaccattccttcaacatctacaaactacaaaacaacaactcatcttcatccgctatgaacattaccaataataataatagcaacaatagtaatatccagcatccttttctgaagaagagcgattcgataggattatcttcatccaacacaacaaattctgtaagaaaaaactcacttatcaagccaatgtcgtccacgtccctggccaatttcaaaagagctgcctcagtatcttccagtatatccaatatggaaccatcaggacaaaataaaaaacctctgatacaatgtttcaattgtaaaactttcaagacaccgctttggaggagaagcccagaggggaatactctttgcaatgcctgcggtcttttccagaaattacatggtaccatgaggccattatccttaaaatcggacgttatcaaaaagaggatttcaaagaagagagccaaacaaacggacccaaacattgcacaaaatactccaagtgcacctgcaactgcctcaacttcagtaaccactacaaatgctaaacccatacgatcgaggaaaaaatcactacaacaaaactctttatctagagtgatacctgaagaaatcattagagacaacatcggtaatactaataatatccttaatgtaaataggggaggctataacttcaactcagtcccctccccggtcctcatgaacagccaatcgtataatagtagtaacgcaaattttaatggagcaagcaatgcaaatttgaattctaataacttaatgcgtcacaattcgaacactgttactcctaattttagaaggtcttcaagacgaagtagtacttcatcgaacacctcaagttccagtaaatcttcatccagatctgttgttccgatattaccaaaaccttcacctaatagcgctaattcacagcagttcaacatgaacatgaacctaatgaacacaacaaataatgtaagtgcaggaaatagtgtcgcatcctcaccaagaattatatcgtccgcaaactttaactcaaatagtcctctacagcagaatctattatcaaattctttccaacgtcaaggaatgaatataccaagaagaaagatgtcgcgcaatgcatcgtactcctcatcgtttatggctgcgtctttgcaacaactgcacgaacagcaacaagtggacgtgaattccaacacaaacacgaattcgaatagacagaattggaattcaagcaatagcgtttcaacaaattcaagatcatcaaattttgtctctcaaaagccaaattttgatatttttaatactcctgtagattcaccgagtgtctcaagaccttcttcaagaaaatcacatacctcattgttatcacaacaattgcagaactcggagtcgaattcgtttatctcaaatcacaaatttaacaatagattatcaagtgactctacttcacctataaaatatgaagcagatgtgagtgcaggcggaaagatcagtgaggataattccacaaaaggatcttctaaagaaagttcagcaattgctgacgaattggattggttaaaatttggtatatga

SEQ ID NO: 221 - DNA, 3249 bp, Saccharomyces cerevisiae
atgactaccacgataggatccccacaaatgctggctaatgaggagagactttctaacgagatgcacgcactgaagaaccggtccgagcagaatgggcaagagcaacagggtcccgttaagaacactcaactgcatggcccttctgcaaccgacccggaaactacggccacccaaaaagaatctctagaaatggtaccgaaagatacaagtgcagcgactatgacaagtgcgcctccgccagcgttgccgcatgttgagattaatcaagtcagtctggcattagtaataaggaacttgacggtatttacaatgaaggaacttgctcagtacatgaaaactaatgttcacacccaggcaaatgagcctaactccgcaaagaaaatacgtttcttacagctgattatattcctaaggacacaatttttgaaactttacgtgcttgtgaaatggacccgtactataaaacaaaacaactttcacgtactaatcgatctgttgaactggtttagaacgactaacatgaatgtcaacaattgtatttgggctttgaaaagcagtctaaactctatgaccaatgctaaattgcccaacgtggatttggtcaccgctttggaagttttgagtcttgggaggccaaatctacctacacacaactttaaattaagcggtgtcagtaactctatggatatggtagatggaatggccaaagttcccattggattgattttacagagattaaaagatttgaacttgactgtctcaataaaaattgcattaatgaacattcctaaaccattaaacagctatcatatcaaaaacggtagaatctactttactgtccctaatgaatttgaaatccagttatcgactgttaatagacagtcccctctgttttttgtggatttaaaattgttgtttaacacggaagctgaacaaactgtttcagcagttacagaagctacttcgactaacggcgatagtgagaacaatgaagaaaactcaagttccaacggaaataaccttcctttgaataagccaagattagagaagttgatcaatgaaattcttttgaaaagtaatgatccattattatccctatacaattttctgcacaaatacgtgttgacattacagctatacatggttcatagagagtttttaaagctggccaacggcggtaaattttccaaaagtaatttgatccataactatgactctaaaaaaagtacaattacagttagatattggctgaatgggaaaatggacagtaagggtaagatcactattggcattcaaagaacaacagaaagtcttatcttaaaatgggacaaccagagtgcatcaagggccaaaaatatgcctgtaatttataacaatattgtatctaatatcgaagggattttggatgaaattatgttcaatcatgctagaatcatcagatcggagctgttggcaagggatatattccaagaagacgaagaaaattcggatgttctattatttcaactccctaccacatgtgtttccatggcgcctattcaattaaaaattgatttattgagcgggcagttttattttaggaatcctactccactattatcaaattacgcgtcaaagataaatagagctgaaggtccagaggaattggcaagaatactacagcagctgaaactggacaagattattcatgttttaaccaccatgtttgaaaacacgggatggtcatgcagcaggattattaagattgataaaccaatcaggactcaagtgaatactggcggcgaaagcgttgttaaaaaagaagataataaatatgctattgctggtaacagcactactaatagtgatgtttccttgttattacaaagggacctatttatcagactaccacattggccgctcaactggtatttgattttatcgataatatcctctaaaacatcatgtgtggtggaaaaaagaatcggtaaaattgtctctcaacgtgggaaatggaatctcaaatatttagacaattccaacgtgatgactgtcaaattggagtcaataacatatcaaaaaattatgatattgcaaagaactattttaaacagaattataaaccatatgttgatcgattctttgaaccaactagaaattcgcaataagatttgttcttctgaaatgatcaacgagcaaaaactacctcaatatattatccaaggaagtaatactaatgataacatatcaataataactctagaattggagtcatttttggaaggttcaaaagcgctgaactccatattagaaagttccatgtttctgaggatagattactccaattcccaaatacgattgtatgctaaatttaaaagaaacacaatgatgattcaatgccagattgataaactatacattcattttgtacaagaagaaccgttagccttttatttggaggagagttttacaaatcttggtataatagtgcaatatctaaccaaatttaggcaaaaattgatgcaattggttgtactaacggatgtcgtggaaagattgcacaagaattttgagtccgaaaacttcaagataattgcattacaaccgaatgaaatttccttcaagtatctctccaataatgacgaagatgataaagactgcacaataaagatatcaacgaatgacgactctattaaaaatctgacagttcaactatcaccttcaaacccacaacatataattcaacctttcttagataattcgaaaatggattatcattttatttttagctacctacaattcacgtcatccttgtttaaagctctaaaagtaattctcaatgaaagagggggcaaattccatgagagtggaagtcagtactccactatggtgaacattgggttgcataatctaaacgagtatcagatagtatattataaccctcaggcaggcactaagattacaatatgtatagaattgaaaactgttttgcataacggccgtgataaaattcaatttcacattcattttgcagacgtagcacacataaccacgaaatctcccgcctatccaatgatgcatcaagtgagaaatcaagtatttatgctggatactaagagattaggtaccccagaatctgtcaaacccgcaaacgcatcacatgccattcgtttgggcaatggcgtggcttgcgatcccagtgagatagagcctatcctaatggaaatccataatatcctcaaagtggactcgaactcaagttcatcttag

SEQ ID NO: 222 - DNA, 1794 bp, Saccharomyces cerevisiae; identical to SEQ ID NO: 180

SEQ ID NO: 223 - DNA, 4029 bp, Saccharomyces cerevisiae
atgagcttatcaccacacgtagaaaatgcttccattcccaaggggagtaccccgataccaaaaaacagaaacgttagttctataggcaagggcgagtttcttggatcttcgtcaagcaacaattcttcttttcgaatgaatcattactcaaatagtggacaaccttccgtgttagattctatacggcgacctaatctaactccaactttttcttacagtaatggggtttatatgcctgaaagtcacagaactagttcattcaacgatagttatttgccatatgataagaatccttacgcaaaaacaaccggaagcatgagcaataaatcgaacatgaaaatcaaaacaaagaaaaatgcaatcaacacaaatacaagaaagtcgtctggactcatttacaccaccaaagtggataaagaattatctagtatagacaaagtgaatgatccaaacattaacggtcttgtttgtgcaggtaaaactcatttggggctctataaattctcgccctcagatagatctatcaaatgcgttcatgatttcataacacctaatagcaacacctcaacaaggggaacgacatcccttttgcccaagctgagcaaaagaacaagacagaacaaatttagtaccattgcggatgttaagactggatttaataattacaagaactgtattgcagtgtgcaacaattctacggcgatatcgatatatgatctcaataagagttcctcgatagacaatcccttgataacatccttatgcgaacacactagatctatcaatagttttgacttcaacatggtcgaatcaaacctaataataagtggtggacaagatagttgtgtaaaaatatgggatttacgttccaataaatctaaaagctcaaatagatctgacattagtataaataccgcatctgactcaatcagagatgtaaaatggatgcccggttacaattttgcatctaagaacgatcaaggttcatcaacgtatggtaatttaaaaagcggttacaaatttgcttctattcacgattcgggatacttgctaaagtttgatcttcgacaacctgcccaatacgaaaaaaaattaaatgctcacacaggacccggtctttgtttaaattggcatcccaatcaagaatacattgctacaggtggtagagacggtaaatcctgcctctggtttgttggcgacaatgccaatgccgccgaaaatacagtcctcaattacgggaactctccctcgttacatgcccccaatacgtccttgaacaatagcggctcgctggcatttcccaaactaacaattaatacgggctatccagtcactaaattgaagttcaagcctgcttatagtagtaatatatataattcattactaggaatatcgtcaatgggtgacgaagctgaagttcgcatctattccttggcaagaaagtacattccaaaacatgttctcctatcagaaacgccttctttaggattagtatggtgggacgaaaacttgatctttaatatcgataaggggacccgtataaatggctgggacattaacaaagaaccaacagtgctcgaaaatttgagcaaaaatacaacaacttggagagatttggatggtaacggtttactttcagttggccaagagataggctcatatgaggtggtagaaccggagcttcaacctacctcaagtaccacatgcaagaagcatccaggtacaataaaaaacccgaagaatggcaatccagagaaccagggaataattggagggataaaaaaaggatttagccatactggattaacaagttttacgccagagaggccgcctactttaaaagcaggcccaacgtttagcacaaaaagcttaacattagcatctggagcatcttcttttaacagctcttccgcatcattgacatccctgacgccacaaactgaaaatagagaagaaatcgccattgaaccgccttgtatcatcactttggatataccgcagatcttcaataacataagattaaccaaaatcgcacattcaagaaaaaagaacgtcatttccgaaagttcttctatgaaaaattctccagtagaaaagttcaaatatttggcgagacagctcaagttttcgtatattcgagagcataatgtttcagacagtgcagacactgcatataaaaatgatatagagaacattgacgtcgttaaaaacgcaaccgaaacacatggtgataatactactactaccaataataatgatgatggtgatgatgatgatgatgatgatgatgatgacaaaataatcgaaagtcaccttttgaaaaaatacaattttccagaaaataatacatgggctaccttaatgaatgaaaaagtaaataacaaaaaatccaaaagaaattccagtagttcgagggagtttgacgagaaggatgtcagatcaagtatatcttccatttctgcaagtaggcaaagtcatgacagagctaggaagatcgacaagaacgtggaagcagaactgcaagaaaaaatacaaacactggtagatttgatatctattgcaacgcataacgcatctgtttatctatccatagatgatctaaccaacttcaaaatctggatcttgataagagattcattgttatgggacttgaagtggatgacctcctcccaaatttcatcagataacgcatctaatatggatgccaatgaaagctccgatttcgaagctggagaaaatctgaaaacaggaaaagagttcccagaggaggatggtgcagggacaagtggggctgagtcgttagttgaagaaaggccgcaggcatttcgtgctaactctgatgaaccaagtgatgccgaaaagaaacctgtttctaagctcaaagagcagctcaaaaacacggaaataatcccctatgcgcagccaaatgaggattcagatgaagttttaactaagctaaaagagctacagaaccaacgcttggagtcaaggactaaaatgggagaaacagtgagtgacgatgtgattatagaggaagacgaacatgaacatcaagaagaagaacagcctcatgactcaccgactaagtcagcacaatttcacgcgtctcctatcgcgaaaagtataccaatattgcagaaacgtgagcaccgcaagtcattcatagatactttcatgttgcattctcccaacggttacaatggagatacggacataggtaacgaagatgacaatatatctcctaggtttacttacaacagcgtaagcccacgcagtaaggtttcgtcgctacaaagctatgccacaacaacctcgcaactagaaacttttaaaaagctttcttcccatacagcaccaataatcggttcgcccagacatgcgccatcacggccagatagcattggtagggaacaactgtcttcttcattgacgaaaaagcttgccaaatgcaagaaaattatcgctgacccaccctgggacacgaaaaaactcatcaaacaactctacaatcaagctactgagactgggaacgtcgtattgacggtgaatattttatttcttttccaaacgatataccaaataacagaaatcgacattgcaaaggacgcaatcgctcacttcttgttattattacatcgatacgaactcttcggcattgctgcagacgtcgtcttaaaatactgcccattcgaagatatcatgggttctgagggtgaccaatcttccattcggttgttttgcgaacgctgtggtgagttaatcactaacgaaagttctaaagaaaagctcagagcggaagctcagcagacgggcaataagaagatcatggacaagtttggatactggtattgtgactcttgtaagaagaagaatacatcttgtgttctatgtgaaagaccattaaagaaactgaccatggtcatcctcccctgtggacacgaaggtcacttccagtgcatacaagaatggtttctcgatgagaatgaacaagaatgtcccggcggttgccccggtgttgcattcatctag

SEQ ID NO: 224 - DNA, 1533 bp, Saccharomyces cerevisiae
atgcacgttttctttcctttgcttttccgcccttcccctgttctgttcatcgcatgtgcatatatatatatagatatatatatacattgtacacggtgcacggtagtgaacataactatgagcacgaacagagtcccgaacctcgacccggacttgaatttaaacaaagaaatctgggacctgtactcgagcgcccagaaaatattgcccgattctaaccgtattttgaacctttcttggcgtttgcataaccgcacgtctttccatcgaattaaccgcataatgcaacattctaactctattatggacttctccgcctcgccctttgccagcggcgtgaacgccgctggcccaggcaacaacgacctcgatgacaccgatactgataaccagcaattcttcctttcagacatgaacctcaacggatcttctgtttttgaaaatgtgtttgacgacgatgacgatgatgatgacgtggagacgcactccattgtgcactcagacctgctcaacgacatggacagcgcttcccagcgtgcttcacataatgcttctggtttccctaattttctggacacttcctgctcgtcctccttcgatgaccactttattttcaccaataacttaccatttttaaataataatagcattaataataatcatagtcataatagtagtcataataataacagtcccagcatcgccaataatacaaacgcaaacacaaacacaaacacaagtgcaagtacaaacaccaatagtcctttactgagaagaaacccctccccatctatagtgaagcctggctcgcgaagaaattcctccgtgaggaagaagaaacctgctttgaagaagatcaagtcttccacttctgtgcaatcttcggctactccgccttcgaacacctcatccaatccggatataaaatgctccaactgcacaacctccaccactccgctgtggaggaaggaccccaagggtcttcccctgtgcaatgcttgcggcctcttcctcaagctccacggcgtcacaaggcctctgtcgttgaagactgacatcattaagaagagacagaggtcgtctaccaagataaacaacaatataacgccccctccatcgtcgtctctcaatccgggagcagcagggaaaaagaaaaactatacagcaagtgtggcagcgtccaagaggaagaactcactgaacattgtcgcacctttgaagtctcaggacatacccattccgaagattgcctcaccttccatcccacaatacctccgctctaacactcgccaccacctttcgagttccgtacccatcgaggcggaaacgttctccagctttcggcctgatatgaatatgactatgaacatgaaccttcacaacgcctcaacctcctccttcaacaatgaagccttctggaagcctttggactccgcaatagatcatcattctggagacacaaatccaaactcaaacatgaacaccactccaaatggcaatctgagcctggattggttgaatctgaatttatag

SEQ ID NO: 225 - DNA, 921 bp, Saccharomyces cerevisiae
atgaattataactgcgaaatacaaaacaggaacagtaagaatgttgacaatcaagtcagtctaccccctatccaagttctatttaactccatagaaaaacggagtatgcccgagttggcattttcgaacatagaatactcgcatgggaaccttcggtctagtaccgaggaacaaaactatcctgcgcctgtgttacttccacagcatcattcgattgcgtatcccgcaattaattctggcggtactagtactactgctactcctactgcttctacagttgaaacgtccaagacgagtagcagtgctatggatacacaatctcaatatggcagttcaaagaagtcaaaatcggcgtccgatgatgcaaagccctgctacaaatccgccccaatatatgaaataatcaataaggaaaaggatgcgggggcacaatacaacaggccattttcggattttgtagaatctaaatcaaggaggaagcaaaattcgggcaggaggtctaacctgccaaaggaaacagtgcagatactgaatacttggttgctgaaccacctgaataacccctacccaactcaacaagaaaagagggagttgttaatcaaaactgggctaaccaagattcaactttctaattggttcataaatgtgagaagacgcaaaatatttagtgattactataccctggtaaactcaattcctaatgacaacgcgaataataccccagtggaacgagttcaaaacgtctcagcatatcataacacattatctgccacaaataatactatgtacgatgctacgtcaacctgctccacggattatgaattatccaagagatttgctcatgcccccgttacacgccgtaaaaaactaattgataggctggaagaattgaaaaagctatccaaccctgatatgaattga

SEQ ID NO: 226 - DNA, 1848 bp, Saccharomyces cerevisiae
atgctaagctatttccaagggtttgtgcccatacacacaatattttactccgtgttccatcctacagaaggttctaagattaaatacgagtttccgccaaataatttgaaaaatcatggtattaatttcaacacatttaaaaactacatcataccgaagcctatattatgccacaagttgatcacttttaagtatggtacatataggattgtatgttatcctgtgacaatcaattctccaatatatgctaggaatttttttagttttaattttgtatttgtattcccatatgattgtgagacgtctccctacgaaccagctattactaggctgggcaaaatgttcaaagttcttgaagaacaaaatcaattgctatccaaatcggaaagagatccagttttcttcgatttgaaggtgttggaaaactccacaacaacaccctccactgcaggtccttcatccacgccaaatcctagtagtaacaccacaccaactcatcctacatccgaaaaggatacaaaggatatgagaagcagcagatacagtgaccttatcaaggatttgggccttccgcaatccgcattttccatacaagatttattgatgagaattttccaagacctgaataactattccgaatgcctcataccaattgatgagggaaatgcagtagacataaagatttttccgctgttgagaccaccgacaacttgtgtctcattagaagatgtgcccctgtcgtctgtaaatttgaagaagattattgatgtcaactgggatccaaccatgatgagtatagtcccttacattgatggcttaaacagcattgccaaaatttctaaactaagcaacagtgatcctggcctagtgatagagtgcatacgtcacttaatatactataagtgtgttacattatcagatattttccaattttctaacatatacgctccttcttcattaattaggaattttttgactgatccactaatggctagtgactgtcaatcttatgttacgttcccagaagtgtctaaaatatcgaacttgcccttaaacaaaagtctgggttcaggtgaccaagactcaccatcattttctgtacgaagaaaatccaaatcatctagcataccgtcaaacccggattctagaactacatcttttagttctaccagtagagtttctcaaaactcctccttaaattcctctttttcatcaatttataaagactggaggcaatcacaaacctcctgctcgagttcaaatattcatgtcatcaacaatcgtaaccgattcctaccaacaagatcatgcctatttgacctttataggtcactttcacaaggtcaaacgctgaaaacatggtatgagtcgaaatatatgattttaaaagaaaataacattgatataagaaggttcataacgtttggcctggaaaaacgtatcatttacaggtgctactcttttcctgtaatgataaatgcaggttcacgtgaaccaaaagaaatgacaccaataataacaaaagatttagtgaataatgataagttacttgaaaaaagaaatcacaatcatttgctttcagccacagggtctagaaatacggcacaatccggcaacttgaaaccagaaagaccatcaaaggtttcatttgaaatgcaaagggtaagttcgttggcaacaggcaaaagtactatgccgaaactcagcgacgaagaagaaggtattcttgaagagtctattaggaatgccgaaacatttgataaaatttgcgttttactgagcaagcctaaattagaagtcgaaagctacctaaacgaattaggagaatttaaggtaattaatagctga

SEQ ID NO: 227 - DNA, 2895 bp, Saccharomyces cerevisiae
atggaccctcaccaatcaccagctgataatgccgcatcgcctacgaagagcgtgaaggcaaccactaaaaattcgtccacgaataataatgtcaatagcaacaacagcaataataacagtaaccatgatatactgaattttaatgataactatactaccattctgcaacatttggcaaacgaccatcctaatatactgagggagaaaggaggatcacaacaacaacagcaacagcagcagcagcagcaacagcagcaacaacagagcctggatacccttttgcaccattatcaaagtttactctccaagagtgataatgcaatagcctttgatgacaatgttagtaacagcgcagatcataatggcagtaatagcaacaataataacaacaataatgacatatctagtcccggtaatctgatgggatcttgcaatcaatgtagattaaagaaaacaaagtgcaactattttcccgacctaggcaactgtctcgaatgtgaaacgtcaagaactaaatgcaccttcagtattgctccaaattatttgaaaagaacgtcctctggggcaaacaataacatgccaacctcttcaaactccaaacgaatgaaaaattttgaagactattcgaatcgcttacccagtagcatgctctatagacatcaacagcagcagcaacagcaacagcagcaacagcgtatacaataccccagatcctcttttttcgtcggtccggcctcagttttcgatttgaacttgaccaagcatgtaagactagataatgttgaccaaatacagctatcaaaaactttatcattaagaaaggtgtctcctaccgcacagtttattcttcaggacgattttgacacgacccttcatagtaagcaagaatacgaagttgatttggtcgaaaatctggtacatccgcacggtcaccttttagtagagattttcttcaaattgattcatccttttcttccaattttacacgaacgtgtatttttggaaaagtattctagatcttatagagaactcactgcgcctttactggcatccatttactcactggcattacaatattgggattttcatcctgcgcttttggggttccctaaacccgatgtaactgctcaactaaacaatatcgcattggaaacattttatgctcgagttggaaggccaaaattgagcattatacaaacaggccttttgattttgcaatgccgtagtgaatgtcataacaactgggtcctctgctccagcgtagtggcccttgcagaggaattggggctcggggttgaatgtaatgattggaaacttcccaaatgggaaaaagatttgagaaagagattagcgtgggcagtttggttgatggatagatggtgcgcactaaacgaaggtagacaatcccatttaattttaggtaggaactggatgatcaagctattaaactttgatgattttcctctgaatttgccaactattttaaattccttgcaaaatggccagtcggggtcttcaccctcgtcatcaaatgatgtgaaaaaccatcagatagcatttggtaacttgcccatatttaatataaaccccactttagaagatttcaagaatggaacgcttatgtttcaacaaatggtttccttgagtataattcttggggaaatcatggacacattttacactcagggatccatgacaataaacaaaagcattgaacaggtattgaaactggcaaagccgttgcaactgaaattaagagaatggtaccattccctacccaagaatttgtcaatgagttatgccacgccacaaaaattgaactcaaattcaactttaactctagcttattttgccacggaaattacgttacataggaaaattatctgtgccttgaatcctcaaactccaaaggaactggttcaagtatgcaggactgctgcaagaaccaggcttgtagcagcaattgaatttataagagatctaaaaaacgaacatattaatgctttttggtataactgctcaactggaaatctgatgctaattggaacatttgctgccctgctgtatgtgacttcagctacgaaggaagaggctatgattttcagagattatgttagaaattatacctgggtattgaagataggttccaaatactttgataaactatcgaatgctttgaataatatgcatttactatttgcacaaattcctggtcttctgaccgatgaaccggtggtcgtgagccctaactctaacatcagttccgttaacccacaaaggtcaggtgtacaatcgcaaatcccaatacaatttaacgtgggatcacctgccatgaccgagcaaggatctcctttaaaccagtggaagaatctgccccaggaaatcttgcaacaactaaactcctttcccaacggtacgaccagtacaacaacgccagtaaaccccacttccagacaaacacaactagaatcgcagggaagtccagccataaatagtgctaataataatagcaacaacacgcctttaccatttgcgccaaataagtcttctaaaaaaacttcacaatcttcaccaaatgttacgccctctcatatgagcagacaccccccctctaatacatcttcaccaagagtcaattccagcacaaatgtcaactctaatacacaaatgaatgcttctcccttgacctcaattaacgaaaccagacaagagtcaggtgacgctgcagatgaaaaaacagcaggaagagaaagaaccgccaacgaggaatcatcaacggaactcaaggacgataatccaaactcgaaccaggaaacaagcgcaactggtaaccaaactataaaaatgaatgatgataaaaatgtaacaattaacacaagggaaacccctctgtaa

SEQ ID NO: 228 - DNA, 768 bp, Saccharomyces cerevisiae
atggatgaatcggtggatcctgtggagctgcttctacgactactgatacggcacaaacctcatctgaaaccatatgcctacagacaagatagctggcaaagggtgctcgatgagtacaacagacagactgggtcaagatatagacaatcaaggacgttaaaaaccaaatttcgtcgactgaaggacctcttcagcgcagatcgagcccaattctctccttcccagttgaagctgatgggagcactcttggacgaagcatcagaacatccaagaccaagaactaaattcggaaatgaatcatcttcatcctcatcatcatcttctttcattaaaagtcatccggggcctgatccgtttcaacaattatcatccgctgaacatccgaataaccacagctccgacgatgagcattcaggctcacaaccgctgcccctggattcaataacgattggaattccgcctactcttcacacaatccccatgattctgtctaaggataacgacgtcgggaaagtcatcaaaagccctaagataaacaagggtacaaataggttcagcgagacagtactgcctccacaaatggctgctgagcaatcgtggtcggactctaatatggaattggaaatatgtctagattatcttcacaacgaactcgaggtgataaagaaaaggcaagaagattttgagtgtaaagttttaaacaagctcaacataattgaggctctcctttcacagatgagaccacccagccaaggagataaaatataa

SEQ ID NO: 229 - DNA, 5853 bp, Saccharomyces cerevisiae
atgtccgttgctgatgatgatttaggatctttacaaggtcacattaggagaacactgaggtctattcataacctcccctattttaggtatacgagaggtcctactgaaagggctgacatgagcagagcccttaaagagttcatttacagatatctatactttgtcatttctaacagcggagagaacttacctactttattcaatgctcatccaaaacaaaaattatctaacccagagcttactgtttttcctgacagtttagaagatgctgtggatattgataagataacatctcaacaaactattccgttttataagatagatgaatccagaataggagacgtccataaacataccggaagaaattgtgggaggaaattcaaaataggggaacccttgtataggtgtcatgagtgtggttgcgatgatacttgtgtgctttgtattcattgttttaatccaaaagatcatgtgaatcatcatgtttgtaccgatatatgtactgaattcactagtggaatttgtgactgtggagatgaagaagcttggaattctccacttcattgcaaagctgaagaacaagaaaacgatatatcggaagatcccgccacaaatgccgacataaaggaagaagatgtatggaatgattcagtgaatatagcattagtggagttggttcttgcagaagtgtttgactattttatcgatgtttttaaccagaatatcgaacctctacccacaatacagaaagatatcactatcaaattaagagagatgacacaacagggaaaaatgtatgaaagagcgcagtttttaaacgatttaaaatatgaaaacgattatatgtttgacggaacaacaacagcaaagacgagcccctctaatagccctgaggcatctccatcgcttgcgaaaatcgatcccgaaaattacacggtaataatatataacgatgaatatcataactattcgcaggctacgactgccttgagacagggggttccagataacgtacacattgatctattaacatccaggattgacggagaaggtcgagcaatgttgaaatgttcacaagatttatcatctgtcttaggtggtttttttgctgttcaaacgaatggattaagtgccactttaacatcgtggtcagaatatcttcatcaagaaacatgcaagtatatcatcctttggattacacactgtttaaacataccaaactcctccttccaaaccacttttaggaacatgatgggtaaaaccctgtgttcagaatacttaaatgcaacagaatgtcgtgatatgacaccggtggtggagaaatatttcagcaacaagttcgataagaatgatccctacagatacatcgatttatctatccttgcagatggcaatcaaattcctttgggtcatcacaaaattctacccgaatcaagcacccattcactttcaccattgataaatgatgtagaaactccaacatcaagaacatattctaatacaagattacaacatattctttattttgataacagatattggaaaagactgagaaaagatattcagaatgtgatcattccaacgttggcctcttcaaatttatacaagcccattttctgtcaacaggtagtcgaaatattcaaccacatcacaagatctgtggcatatatggatagagaacctcagctaacagctataagagagtgtgtcgtacagttatttacatgccctacgaatgccaaaaatattttcgaaaaccaaagttttttggatattgtgtggtcaattatagacatttttaaggagttttgtaaggtggaaggtggtgtattgatctggcagagagttcaaaaaagcaatttaacaaagagttacagtatatcattcaagcaagggttgtatacagttgaaactttattgagtaaggtacatgatcctaatattccattgagacctaaggaaataatatctctattaactctttgcaagctcttcaatggagcgtggaagataaagcgtaaagaaggtgaacatgttcttcacgaagatcaaaatttcatctcctatttagaatataccacctccatttacagtattattcaaacagcggaaaaagttagcgaaaaatcaaaagattccattgattcaaagctttttttaaatgcaataagaattatcagttcatttctaggcaatagatcactaacatacaagttaatatatgattctcatgaagtcattaagtttagcgtaagccacgaaagagttgcatttatgaatcctttacaaacaatgctttcattccttatcgaaaaagtgtctttaaaggatgcatacgaagcgttagaagactgttcagattttctgaaaatatcggatttctctttgagatcagttgtattgtgctctcaaattgacgtcgggttttgggtaagaaatggtatgtctgtgttacatcaagcatcgtattataaaaacaatcccgaattaggttcctattccagagatatacatttgaatcagttagctatcctttgggaacgtgatgacattccgagaataatatacaatattcttgatagatgggaattactagactggtttacaggtgaagttgactatcaacacactgtctatgaggataaaatttcattcatcattcaacaattcattgcctttatttatcaaatattgaccgaaagacaatattttaaaactttctcttctctaaaggatagaagaatggatcaaatcaaaaattcaatcatttataacctttacatgaaacccctttcgtattcaaagctactaagatcagttcctgactacctaactgaagatactaccgagtttgacgaagcacttgaagaagtctctgttttcgttgagcctaagggcttggccgacaatggtgtttttaaattaaaagcaagcttgtatgcaaaggttgatccgttaaagttgctgaatttggaaaacgaattcgaaagtagtgcaactattattaaatcacatttggctaaggataaggatgaaatagcaaaagttgtactaataccccaagtctcaataaaacagttagataaagacgctctcaatctgggtgcttttacaaggaatacggtatttgccaaagtggtctataaactactccaggtatgtctggatatggaggatagcactttcctgaatgagctactacatttagttcatggtatattcagggatgatgaattgataaatggtaaggactctataccagaagcttatttgtcaaagcctatatgtaatttactcttgagcatagccaatgctaaatcagacgtattttccgagagtattgtccgtaaagccgactatttgttagagaagatgataatgaaaaaaccaaatgaactttttgagtcattaattgccagttttggcaaccaatacgttaatgattataaggataagaaactacgccaaggagttaacttacaagagacagagaaggaacgaaaaagaagattggccaagaaacatcaagcaaggcttctagccaagtttaacaatcaacaaacgaaattcatgaaagaacatgagtctgaatttgatgagcaggataacgatgttgacatggtcggtgaaaaagtatatgaatcggaggattttacctgcgcactatgtcaagattccagttcgaccgatttttttgtgatacctgcgtaccatgatcattccccgatatttagacctggtaatatttttaacccaaatgaatttatgcccatgtgggatggtttctacaacgatgatgaaaaacaagcttatattgacgatgatgttttagaggctttgaaggaaaacggtagttgtggatctaggaaagtatttgtatcctgtaatcatcacattcatcataactgcttcaagaggtacgttcaaaaaaagagattttcatcaaacgcgtttatatgtcctttatgccaaacattttcgaattgtactttacctctttgtcaaacctcaaaggcaaatactggtttgtcgctagatatgtttttggaatcagaactttctttggatacattgtcaaggctcttcaaaccttttactgaggaaaattatcgtacaataaactctatattttcgttgatgatatctcagtgtcaaggttttgataaagcggtaagaaagcgggccaacttttcgcataaggacgtttctttaatattaagtgtgcactgggcaaataccatttcaatgttagaaattgcttctaggttagaaaagccatacagtatttcatttttcagaagcagggaacagaaatacaaaactttaaaaaatatattagtctgcattatgctgttcacctttgtcataggcaagccaagtatggagtttgaaccgtacccgcagcagcccgatactgtttggaaccaaaatcaactcttccaatatattgttcgaagcgctttattttctccagtttcacttcgtcagactgttacagaggcgttaacaacgttctctagacagtttctaagagattttcttcagggtctttctgatgcagaacaggttaccaaattgtatgctaaagcgtccaaaattggggatgttcttaaagtaagtgagcagatgctcttcgccctaaggaccatatctgatgtacgaatggagggattggactccgaaagtattatttatgatctagcttataccttcctgttgaagagtcttcttcctacgataagaaggtgcttagtctttatcaaagtgctacacgaattagtgaaagattctgaaaatgaaacgctggtcatcaacggtcatgaggttgaagaagaactggaattcgaagataccgccgagtttgtcaataaggcattgaaaatgattactgaaaaagaatccttagtcgatcttttgacaacgcaggagtccattgtatcgcatccatatttggagaacatcccatatgaatattgtgggattataaaactgatagatttatcaaaatatttgaatacttacgttacccaatctaaggaaatcaagctacgtgaagagcgttctcagcatatgaagaatgcggataatcgattagatttcaaaatatgtttgacatgtggtgtcaaagtgcatttaagagcggaccgccatgaaatgaccaagcatttgaataaaaattgttttaaaccatttggcgccttcctgatgcccaattcaagtgaagtttgtctccatttgacacagcctccttctaatatttttatatctgcaccatatctaaattcgcatggtgaagttggtagaaatgccatgagaagaggtgatttaaccaccttgaatttgaaaagatatgagcacttaaacagattatggattaacaatgaaattccaggttatattagtagagtaatgggtgacgaatttcgagtgactatactttccaatggtttcttgtttgcatttaatagagaaccaaggccaagaagaatacctccaacagatgaagatgatgaagatatggaagagggagaagacgggttttttacggagggaaatgacgaaatggatgttgatgatgaaactggacaggccgccaacttatttggggttggcgcagaaggtattgctggtggcggagtacgtgattttttccaattcttcgaaaactttaggaacactctacaaccgcagggaaatggcgatgatgatgcacctcagaatcccccaccaatattgcagttcttaggacctcaatttgatggagctactatcataagaaatacaaatccaagaaacctcgatgaggatgactctgatgataatgatgactctgatgagcgagagatttggtag

SEQ ID NO: 230 - DNA, 2037 bp, Saccharomyces cerevisiae
atgcactctcatagacaaaagtggggccgccagacggatatagcgagggtgctcgacgatatagaacacgacctctatctaccgcaacggctatcactcgatggtgcaactggtactgacgaatcacatgtgcaatacggtatagtcaaagactgctctgtgcttacgtgtggctgctgtatatctgaatcgctattcaatgatttatgcagggaaacttcgaacaagcaaactgcgtgtcccatctgtcagcgagaaaatgttcgactactttcagccatcaagccgctgcgagatttggctcgtcagattgacttcttcagaagtactaccggacagggcgaaagcgaaagcgatgagctccccgctatagtaaagacttcaccatcatcatcatcactatcgctaacgccatcgcgctcttcctccactgctgggctagaagctgataacaagacactatcagaccctacagttaaggagaaatcatcactgctcgaactcttccatattgtggcttcgaagatgcataatgcgaatacagaggtagggtcggaccacccactcacgactggcaccacccgtgatcaagaagaacacaccactaaggagaattactcaagcagcttactcgagcccaactatgacgaccacgcgaactggaaaatcctggataatgcctcgaacacaagaactgtgccgatagataacaacttctctttgatgtctacggacgttacaataccttccacagcaaactaccaaacaaatagtgcacatgatctggacgaagaaaaggagtacttttttgccaactgtttccccatgtacagaaaaaaatttcagttcaacacacaccccaaattcctagggacgaaatccaaattattcatcaaccaaagcatttctcccgattgcaccaaatttgctctaattactgaacacaagtgggaaatttattcgattaatccgaaggacaactctcctcaactagtatcatgtggcaagtctagtggagaatatggtcccaacttcaaccaactaacagagcaatcgtcatcttcactctccactacttctcaagcgtcaaaaaagaaaaagaaaaactggagccaacgtttttgcaaactttccaatgatttcttgataatatcgggttcgcaaaacattcttaatgtacacgacatacaccaaaacggcaaactcatctatacctacgtgtcgagattccccatccgatgcatagacatagatccaaggtcgcagataatagcctacggaatcaccggaaaggatagacatacaggcgcggaacaagcattagtcgtgatccaacaaattaccagaaataaagtgactttggagcccgagttccccccaccaatcaccataacacttccatacagagatcccatcaataccatacaactttcgcacgacgccaagtatctgacatgttcgaccgcgctagagtcgcggttcttgatcatatctttgcagaaaataaacgaaccaagactgataatgaaaagtgttcggtccatagacacttccttagaatctgaaggtatcactgacacaaaacttttcccaggaaatccaaatctgatgtgtatcacatcaacagcattcaattcatctccactggtcataaacaccaaaatcacccaaattaacggtgtacggaccgtggcacaaccatccatgcttataagggtagatgagattggatgcaagattcacaagtgcgaaatatcaccaagaaacgacgcaattgccttcctcgaccgcaacggatcagtttacatcatgtgtgcccccaccatgatggacaacaacgaaaaaagaaggacaatcctcgttgaaaccgtggcaaatgcctacagggcttatgaatcagctactttgcggtttaacccagagggcaacaagctttatattctcgacagaaaggggactttctttgtggaagactttgcatatggcttgccccaatctcgcgaaatcaccaaatgtaagcaaatattccacaaataa

SEQ ID NO: 231 - protein, 731 aa, Saccharomyces cerevisiae
MDKLVVNYYEYKHPIINKDLAIGAHGGKKFPTLGAWYDVINEYEFQTRCPIILKNSHRNKHFTFACHLKNCPFKVLLSYAGNAASSETSSPSANNNTNPPGTPDHIHHHSNNMNNEDNDNNNGSNNKVSNDSKLDFVTDDLEYHLANTHPDDTNDKVESRSNEVNGNNDDDADANNIFKQQGVTIKNDTEDDSINKASIDRGLDDESGPTHGNDSGNHRHNEEDDVHTQMTKNYSDVVNDEDINVAIANAVANVDSQSNNKHDGKDDDATNNNDGQDNNTNNDHNNNSNINNNNVGSHGISSHSPSSIRDTSMNLDVFNSATDDIPGPFVVTKIEPYHSHPLEDNLSLGKFILTKIPKILQNDLKFDQILESSYNNSNHTVSKFKVSHYVEESGLLDILMQRYGLTAEDFEKRLLSQIARRITTYKARFVLKKKKMGEYNDLQPSSSSNNNNNNDGELSGTNLRSNSIDYAKHQEISSAGTSSNTTKNVNNNKNDSNDDNNGNNNNDASNLMESVLDKTSSHRYQPKKMPSVNKWSKPDQITHSDVSMVGLDESNDGGNENVHPTLAEVDAQEARETAQLAIDKINSYKRSIDDKNGDGHNNSSRNVVDENLINDMDSEDAHKSKRQHLSDITLEERNEDDKLPHEVAEQLRLLSSHLKEVENLHQNNDDDVDDVMVDVDVESQYNKNTTHHNNHHSQPHHDEEDVAGLIGKADDEEDLSDENIQPELRGQ

SEQ ID NO: 232 - protein, 770 aa, Saccharomyces cerevisiae
MDNVVDPWYINPSGFAKDTQDEEYVQHHDNVNPTIPPPDNYILNNENDDGLDNLLGMDYYNIDDLLTQELRDLDIPLVPSPKTGDGSSDKKNIDRTWNLGDENNKVSHYSKKSMSSHKRGLSGTAIFGFLGHNKTLSISSLQQSILNMSKDPQPMELINELGNHNTVKNNNDDFDHIRENDGENSYLSQVLLKQQEELRIALEKQKEVNEKLEKQLRDNQIQQEKLRKVLEEQEEVAQKLVSGATNSNSKPGSPVILKTPAMQNGRMKDNAIIVTTNSANGGYQFPPPTLISPRMSNTSINGSPSRKYHRQRYPNKSPESNGLNLFSSNSGYLRDSELLSFSPQNYNLNLDGLTYNDHNNTSDKNNNDKKNSTGDNIFRLFEKTSPGGLSISPRINGNSLRSPFLVGTDKSRDDRYAAGTFTPRTQLSPIHKKRESVVSTVSTISQLQDDTEPIHMRNTQNPTLRNANALASSSVLPPIPGSSNNTPIKNSLPQKHVFQHTPVKAPPKNGSNLAPLLNAPDLTDHQLEIKTPIRNNSHCEVESYPQVPPVTHDIHKSPTLHSTSPLPDEIIPRTTPMKITKKPTTLPPGTIDQYVKELPDKLFECLYPNCNKVFKRRYNIRSHIQTHLQDRPYSCDFPGCTKAFVRNHDLIRHKISHNAKKYICPCGKRFNREDALMVHRSRMICTGGKKLEHSINKKLTSPKKSLLDSPHDTSPVKETIARDKDGSVLMKMEEQLRDDMRKHGLLDPPPSTAAHEQNSNRTLSNETDAL

SEQ ID NO: 233 - protein, 142 aa, Saccharomyces cerevisiae
MADQVPVTTQLPPIKPEHEVPLDAGGSPVGNMGTNSNNNNELGDVFDRIKTHFPPAKVKKIMQTDEDIGKVSQATPVIAGRSLEFFIALLVKKSGEMARGQGTKRITAEILKKTILNDEKFDFLREGLCVEEGQTQPEEESA

SEQ ID NO: 234 - protein, 149 aa, Saccharomyces cerevisiae
MNLQNNVLNQIHQILLPTNPTLDKPNAEATKEEFSSAENRDEKDYLTNQQPKNLSTPSTSSNGEFIPHIFYSLHQIRKDPNNLSNQLETLTGSIRHRLKLCKSLISENEDTKDLLSKSPSEWQDIIHQREQELQIKRDVLDDLYRKLQR

SEQ ID NO: 235 - protein, 1021 aa, Saccharomyces cerevisiae
SSKKEYMDSMNEKVAVMRNTYNTRKNAVTAAAANNNIKPVEQHHINNLKNSGNSANNMNVNMNLNPQMFLNQQAQARQQVAQQLRNQQQQQQQQQQQQRRQLTPQQQQLVNQMKVAPIPKQLLQRIPNIPPNINTWQQVTALAQQKLLTPQDMEAAKEVYKIHQQLLFKARLQQQQAQAQAQANNNNNGLPQNGNINNNINIPQQQQMQPPNSSANNNPLQQQSSQNTVPNVLNQINQIFSPEEQRSLLQEAIETCKNFEKTQLGSTMTEPVKQSFIRKYINQKALRKIQALRDVKNNNNANNNGSNLQRAQNVPMNIIQQQQQQNTNNNDTIATSATPNAAAFSQQQNASSKLYQMQQQQQAQAQAQAQAQAQAQAQAQAQAAQAAQAQAQAQAQAQAQAQAQAQAQAQAQAQAQAQAQAHAQHQPSQQPQQAQQQPNPLHGLTPTAKDVEVIKQLSLDASKTNLRLTDVTNSLSNEEKEKIKMKLKQGQKLFVQVSNFAPQVYIITKNENFLKEVFQLRIFVKEILEKCAEGIFVVKLDTVDRLIIKYQKYWESMRIQILRRQAILRQQQQMANNNGNPGTTSTGNNNNIATQQNMQQSLQQMQHLQQLKMQQQQQQQQQQQQQQQQQQQQQQQHIYPSSTPGVANYSAMANAPGNNIPYMNHKNTSSMDFLNSMENTPKVPVSAAATPSLNKTINGKVNGRTKSNTIPVTSIPSTNKKLSISNAASQQPTPRSASNTAKSTPNTNPSPLKTQTKNGTPNPNNMKTVQSPMGAQPSYNSAIIENAFRKEELLLKDLEIRKLEISSRFKHRQEIFKDSPMDLFMSTLGDCLGIKDEEMLTSCTIPKAVVDHINGSGKRKPTKAAQRARDQDSIDISIKDNKLVMKSKFNKSNRSYSIALSNVAAIFKGIGGNFKDLSTLVHSSSPSTSSNMDVGNPRKRKASVLEISPQDSIASVLSPDSNIMSDSKKIKVDSPDDPFMTKSGATTSEKQEVTNEAPFLTSGTSSEQFNVWDWNNWTSAT

SEQ ID NO: 236 - protein, 439 aa, Saccharomyces cerevisiae
MVTKHQIEEDHLDGATTDPEVKRVKLENNVEEIQPEQAETNKQEGTDKENKGKFEKETERIGGSEVVTDVEKGIVKFEFDGVEYTFKERPSVVEENEGKIEFRVVNNDNTKENMMVLTGLKNIFQKQLPKMPKEYIARLVYDRSHLSMAVIRKPLTVVGGITYRPFDKREFAEIVFCAISSTEQVRGYGAHLMNHLKDYVRNTSNIKYFLTYADNYAIGYFKKQGFTKEITLDKSIWMGYIKDYEGGTLMQCSMLPRIRYLDAGKILLLQEAALRRKIRTISKSHIVRPGLEQFKDLNNIKPIDPMTIPGLKEAGWTPEMDALAQRPKRGPHDAAIQNILTELQNHAAAWPFLQPVNKEEVPDYYDFIKEPMDLSTMEIKLESNKYQKMEDFIYDARLVFNNCRMYNGENTSYYKYANRLEKFFNNKVKEIPEYSHLID

SEQ ID NO: 237 - protein, 785 aa, Saccharomyces cerevisiae
MVCTSTSSNFYSIAQYILQSYFKVNVDSLNSLKLVDLIVDQTYPDSLTLRKLNEGATGQPYDYFNTVSRDADISKCPIFALTIFFVIRWSHPNPPISIENFTTVPLLDSNFISLNSNPLLYIQNQNPNSNSSVKVSRSQTFEPSKELIDLVFPWLSYLKQDMLLIDRTNYKLYSLCELFEFMGRVAIQDLRYLSQHPLLLPNIVTFISKFIPELFQNEEFKGIGSIKNSNNNALNNVTGIETQFLNPSTEEVSQKVDSYFMELSKKLTTENIRLSQEITQLKADMNSVGNVCNQILLLQRQLLSGNQAIGSKSENIVSSTGGGILILDKNSINSNVLSNLVQSIDPNHSKPNGQAQTHQRGPKGQSHAQVQSTNSPALAPINMFPSLSNSIQPMLGTLAPQPQDIVQKRKLPLPGSIASAATGSPFSPSPVGESPYSKRFKLDDKPTPSQTALDSLLTKSISSPRLPLSTLANTAVTESFRSPQQFQHSPDFVVGGSSSSTTENNSKKVNEDSPSSSSKLAERPRLPNNDSTTSMPESPTEVAGDDVDREKPPESSKSEPNDNSPESKDPEKNGKNSNPLGTDADKPVPISNIHNSTEAANSSGTVTKTAPSFPQSSSKFEIINKKDTKAGPNEAIKYKLSRENKTIWDLYAEWYIGLNGKSSIKKLIENYGWRRWKVSEDSHFFPTRRIIMDYIETECDRGIKLGRFTNPQQPREDIRKILVGDLEKFRINNGLTLNSLSLYFRNLTKNNKEICIFENFKNWNVRSMTEEEKLKYCKRRHNTPS

SEQ ID NO: 238 - protein, 1648 aa, Saccharomyces cerevisiae
MSMFNALNSNIEGEQYEAEEHSRELQIEQSFNILQDALIDLKNKDFEKSDSKFQELFQIDVVKPDRWGMYRNSSPTLDNLRYLCYRNRGMYYHLYLENNYERLNSQELVNCILKAVENLVESIQHSDADFAVTDLLARIFKSFNSVKLERLISEYEFTKQENLSLLLGRHRKFLLNDLTLMMNNYVELTNKLLVPNLSDNTIFERYHLEKYKDIKPEPLAFGPILSRISEMKKQDEEIMKKLDVFNVTLNEESWDEVAKALKNLLPSVKTSSLIGRNMDPYNEIEEPIEAVKFELSEAINNTPSLDRESERQEEEQDNESVRADDKSGNLAPSDIQTNEEARPNKRTDEHIDSTKPLQRSSKRFKEREQENSKELVMDVHKRFFGEFNTLLSYIHILPFCDFDTFASKFIIGSSDKQPEKFIPYTDLYECLKSWSSRYTDIFNQNDYLSSGSNENEELFQLNALLKSNAFDDKESFPRYLNDLDSDHIRSFISEVNAGNLHFHQVRLKLLFKLLGTYDEGNGRRLIIDYLWESQLLKIVLWFVFGIESNIFALINKNKRQCKYLALSIYELLVNHLGNIVEEITNKRIQGHKSADLKSQRNKVEKRIRSWHTLLEQIADEKDKELYVHFQWTHYCFLQYTCDIVDSRLSETLTSLENTIKDSDSSLDIAYPNYRHIPALNLNTVQSQKRKIRIIQNITVEDISEDTNSDTHSENHLETLEKVLLHILHPSTNHSNIDEEMVSFIFNSPFLLKIRLWGVLFSSYVKKSSIQDVQRIYFHVLDFMKGALTSPVYKESNPHGRHQMLLTVLTAIGYLSSQLTAILNSNRWESSDFVLEDYMFEKLLQTFFFFYTVLFYESSAVNDVSNKSFFKRASKSSGKMKDIMIDLATLILYYYDLQAKLRTPAEQGIETTELIWSLHTLFGHFHFCDASNGKFLDLAEKLLCQFINNDSFLQLKQILWCRYHYAIASDNFSPDLHDTKAVEMEKIHSLPLGTYLIKLQYQNKNPYLSSSKTTLKQIMDNIIEKIGDPSTLDNHIISRNSFLLNEYLSRPITADLLKHTFSGATSLYLTSPNDELQQGMTAGLFYVSSLQSLGLYKMRKKSMQARPSELDSIIRMLKNDIIYNTNRFESWILLGKCYSYIVEDDLIWTSDKITVPEKKDVIALTQRKAILCYLMAISIYYSKLDRTIDDKKIILEALDDLGSMLISGYYNPMNKLCFSWKSSAENTMRLSETGEVVMEKTKKITTISDFNIEQSIFLCFNRACSLSGDIKSQDDVFVLNWSSFYNLAKFFFKTDGGNNCKLVAKYITQGCQIAYESSPAKDPIIEPHYLLVNACYKWVKRGVIGVNEALTLLSKDNQFFQEQEEFWVNDEGLAWDYQEKFFFDKIIRLLRHLLSVDKKKWQHRPRYRIARILFDDLGDVNGALEEMDSLISAKSINKNLVNIWKPDFERPGKHFIYTYQYLVLYLDLLFAIKDFNTTGLVIKKLRRFGSGTVNVNELLERAINVYTQSAKIKLQLQDKSYVEQILPTLNYQEFLKISEQLNQVFDQGKYPEEISSGLKLAFQLKKGHSGIAFDSVCLGIYFEYLYFPLARQDQSLTDVNDENNPALPSSGSVTSKSTPDPTSKPSAIKKRVTKKEVFDRVRLLVDKIT

SEQ ID NO: 239 - protein, 833 aa, Saccharomyces cerevisiae
MNNAANTGTTNESNVSDAPRIEPLPSLNDDDIEKILQPNDIFTTDRTDASTTSSTAIEDIINPSLDPQSAASPVPSSSFFHDSRKPSTSTHLVRRGTPLGIYQTNLYGHNSRENTNPNSTLLSSKLLAHPPVPYGQNPDLLQHAVYRAQPSSGTTNAQPRQTTRRYQSHKSRPAFVNKLWSMLNDDSNTKLIQWAEDGKSFIVTNREEFVHQILPKYFKHSNFASFVRQLNMYGWHKVQDVKSGSIQSSSDDKWQFENENFIRGREDLLEKIIRQKGSSNNHNSPSGNGNPANGSNIPLDNAAGSNNSNNNISSSNSFFNNGHLLQGKTLRLMNEANLGDKNDVTAILGELEQIKYNQIAISKDLLRINKDNELLWQENMMARERHRTQQQALEKMFRFLTSIVPHLDPKMIMDGLGDPKVNNEKLNSANNIGLNRDNTGTIDELKSNDSFINDDRNSFTNATTNARNNMSPNNDDNSIDTASTNTTNRKKNIDENIKNNNDIINDIIFNTNLANNLSNYNSNNNAGSPIRPYKQRYLLKNRANSSTSSENPSLTPFDIESNNDRKISEIPFDDEEEEETDFRPFTSRDPNNQTSENTFDPNRFTMLSDDDLKKDSHTNDNKHNESDLFWDNVHRNIDEQDARLQNLENMVHILSPGYPNKSFNNKTSSTNTNSNMESAVNVNSPGFNLQDYLTGESNSPNSVHSVPSNGSGSTPLPMPNDNDTEHASTSVNQGENGSGLTPFLTVDDHTLNDNNTSEGSTRVSPDIKFSATENTKVSDNLPSFNDHSYSTQADTAPENAKKRFVEEIPEPAIVEIQDPTEYNDHRLPKRAKK

SEQ ID NO: 240 - protein, 597 aa, Saccharomyces cerevisiae
MNTGISPKQDDASNSNLLNIGQDHSLQYQGLEHNDSQYRDASHQTPHQYLNQFQAQPQQQQQQQQQQQQQQQQAPYQGHFQQSPQQQQQNVYYPLPPQSLTQPTSQSQQQQQQQQQQQYANSNSNSNNNVNVNALPQDFGYMQQTGSGQNYPTINQQQFSEFYNSFLSHLTQKQTNPSVTGTGASSNNNSNNNNVSSGNNSTSSNPAQLAASQLNPATAAAAAANNAAGPASYLSQLPQVQRYYPNNMNALSSLLDPSSAGNAAGNANTATHPGLLPPNLQPQLTHHQQQMQQQLQLQQQQQLQQQQQLQQQHQLQQQQQLQQQHHHLQQQQQQQQHPVVKKLSSTQSRIERRKQLKKQGPKRPSSAYFLFSMSIRNELLQQFPEAKVPELSKLASARWKELTDDQKKPFYEEFRTNWEKYRVVRDAYEKTLPPKRPSGPFIQFTQEIRPTVVKENPDKGLIEITKIIGERWRELDPAKKAEYTETYKKRLKEWESCYPDENDPNGNPTGHSHKAMNMNLNMDTKIMENQDSIEHITANAIDSVTGSNSNSTNPNTPVSPPISLQQQPLQQQQQQQQQQQHMLLADPTTNGSIIKNE

SEQ ID NO: 241 - protein, 431 aa, Saccharomyces cerevisiae
MVVQNSPVSSVHTANFSERGSNTRTMTYKNKLTVCFDDILKVGAEMMMQQQLKNVQLDSYLVNGFSQSQQKLLKEKVKLFHGILDDLETSLSQSSSYLETLTALGKEKEKEREEAEKKRAEQENMRKVREQEELKKRQELEEASQQQQLQQNSKEKNGLGLNFSTTAPANTTDANGSKENYQELGSLQSSSQTQLENANAANNGAAFSPLTTTRIQSQQAQPSDVMFNDLNSMDISMFSGLDSTGFDSTAFNATVDETKGFDDNDSGNNYNDINISSIENNINNNINSTKNGKDNNNESNKNNNGDEKNKNNNEDNENNNNSSEKNNNNNNNNNNNNDDNGNNNNNNSGNDNNNTTNNDSNNKNNSITTGNDNENIVNNDLPTTVVSNPGDNPPPADNGEEYLTLNDFNDLNIDWSTTGDNGELDLSGFNI

SEQ ID NO: 242 - protein, 131 aa, Saccharomyces cerevisiae
NSQGGNIKVKKENALPKPPKSSKSKPQDRRNSTGEKRFKCAKCSLEFSRSSDLRRHEKTHFAILPNICPQCGKGFARKDALKRHYDTLTCRRNRTKLLTAGGEGINELLKKVKQSNIVHRQDNNHNGSSNG

SEQ ID NO: 243 - protein, 672 aa, Saccharomyces cerevisiae
MKQEQSHEGDSYSTEFINLFGKDTATHPSSNNGANNNGMGSTNSLDQFVATASSSSSLVTSSENRRPLIGDVTNRGNTNLYDHAVTPEILLEQLAYVDNFIPSLDNEFSNVDWNVNTTHNNANNNGADTFSSINANPFDLDEQLAIELSAFADDSFIFPDEDKPSNNNNNSNNGNDDHSNHDVLHEDPSTNNRQRNPHFLTQRRNTFLTSQYDQSKSRFSSKNKRNGNNGETNNFGDNMQNNHPFEPNFMGSPSQFPADATNMTSIDHGGFTNVDITSTENNTTGDNGVDALSNLLHRTTHTPNRSSPLSNVTSAQNSSSQQRKHSESKVDSNSDNNSSNKAPNITVPDYSIIPTSVLVTLLPRVNVPNGAYNSLISAGFDNDQIDAIAAIMAYHHQKKIRENNSNNNKNINTNDSQEAPILKNINELLSVLIPPSPAETAAPTTLSTSPSFNEHGVVAEASFLSSILELGIKHPKSNNIHNQRQPSRNDHKISRESDGNNGNDNVHHNNAVIKSSTTRGDEIAKIRSEPTLNASSSDHKENSLKRSHSGDLKNKKVPVDRKYSDNEDDEYDDADLHGFEKKQLIKKELGDDDEDLLIQSKKSHQKKKLKEKELESSIHELTEIAASLQKRIHTLETENKLLKNLVLSSGETEGIKKAESLKKQIFEKVQKE

SEQ ID NO: 244 - protein, 758 aa, Saccharomyces cerevisiae
MDNTTNINTNERSSNTDFSSAPNIKGLNSHTQLQFDADSRVFVSDVMAKNSKQLLYAHIYNYLIKNNYWNSAAKFLSEADLPLSRINGSASGGKTSLNASLKQGLMDIASKGDIVSEDGLLPSKMLMDANDTFLLEWWEIFQSLFNGDLESGYQQDHNPLRERIIPILPANSKSNMPSHFSNLPPNVIPPTQNSFPVSEESFRPNGDGSNFNLNDPTNRNVSERFLSRTSGVYDKQNSANFAPDTAINSDIAGQQYATINLHKHFNDLQSPAQPQQSSQQQIQQPQHQPQHQPQQQQQQQQQQQQQQQQQQQQQQQQQQQQQQHQQQQQTPYPIVNPQMVPHIPSENSHSTGLMPSVPPTNQQFNAQTQSSMFSDQQRFFQYQLHHQNQGQAPSFQQSQSGRFDDMNAMKMFFQQQALQQNSLQQNLGNQNYQSNTRNNTAEETTPTNDNNANGNSLLQEHIRARFNKMKTIPQQMKNQSTVANPVVSDITSQQQYMHMMMQRMAANQQLQNSAFPPDTNRIAPANNTMPLQPGNMGSPVIENPGMRQTNPSGQNPMINMQPLYQNVSSAMHAFAPQQQFHLPQHYKTNTSVPQNDSTSVFPLPNNNNNNNNNNNNNNNNNSNNSNNNNNNNNNNNNSNNTPTVSQPSSKCTSSSSTTPNITTTIQPKRKQRVGKTKTKESRKVAAAQKVMKSKKLEQNGDSAATNFINVTPKDSGGKGTVKVQNSNSQQQLNGSFSMDTETFDIFNIGDFSPDLMDS

SEQ ID NO: 245 - protein, 1047 aa, Saccharomyces cerevisiae
MVENSTQKAPHAGNDDNSSTKPYSEAFFLGFNNPTPGLEAEHSSTSPAPENSETHNRKRNRILFVCQACRKSKTKCDREKPECGRCVKHGLKCVYDVSKQPAPRIPSKDAIISRLEKDMFYWKDKAMKLLTEREVNESGKRSASPINTNNASGDSPDTKKQHKMEPIYEQSGNGDINNGTRNDIEINLYRSHPTMIMSKVMKREVKPLSENYIIIQDCFLKILVTSVFLDTSKNTMIPALTANANITRAQPSVANNLLKLKEMLIRQCQTEDEKNRVNEFTDRILQNTNSNRNLKIGMLLSMLYNSVGYQYLEDHCPQGGEYSDLLRNLINECEAILPSYEIIERYKNHFYEYVYPSLPFIELEIFEESLSQTIFPDPNNPSKVQIRMGSTHLRAKVENLSLLLVILKLSYMSIRFLDHSTADSSFYLSKEIIDKYPIPNDFILLSQRCLASENWCACANENIISCLLYIWSFFAFSPEEGDFFLEHPTDVISSLIMMLSTSIGLHRDPSDFPQLISPSTSDKRTLNHRRILWLSIVTVCSFEASLKGRHSVSPISLMALFLNIKDPDSLTVYMNRVRGDLSDINNHKLLRIHKFTFKRAQLALLLSDLDNLTMTYYGSFHLHSIEFIREKIEIFVEENFPIVPLKSVAQDKSDLDDMNVISEMNILSSENSSSFHNRIMNKLLMLRTSMAVFLHFETLITKDKSIFPFYKKYFMVSCMDALSLINYFNKFFNGEYRHAISSLTSFNVTKFIQLALSSTIFSLLGIILRIGLAIHMLSSEVQKLSGTTDPRIKELNTKVEKFSTLQRDLESALEGIYCSASEHLRFTYFPVFKMLALFDVIVQRMRKGELWHGIFTMIQMEQMHSRIIKTLSITLGVKLDKKDRLLEELMACNHVANFSVEDIDELNRNIKKEIQISSGLKPPVNTIDLTNGEPFGNAVPTFTKTWSSSLDNLEKLSSAAAVGQSLDYNSGLRQGPLAGGGSKEQTPIAGMNNLNNSINATPIVDNSSGSQLPNGFDRGQANNTPFPGYFGGLDLFDYDFLFGNDFA

SEQ ID NO: 246 - protein, 531 aa, Saccharomyces cerevisiae
MASTELSLKRTLTDILEDELYHTNPGHSQFTSHYQNYHPNASITPYKLVNKNKENNTFTWNHSLQHQNESSAASIPPQQTYHFPIFNKYADPTLTTTTSFTTSEATANDRQINNVHLIPNEIKGASETPLQKTVNLKNIMKVSDPYVPTRNTFNYDVKISNDFFDNGDNLYGNDEEVLFYEDNYNPKMQWSLQDNSAAINNEDARAIFNNEFDSDDDDISDDEEDEIEENCLQQEQHQEEPLLSLDVTPISMFGSDQKTGRAKSSSHLFNEYSYVDSNMDSISSVVSEDLLDERGHEKIEDEDEDNDLDEDDIYDISLLKNRRKQSFVLNKNTIDFERFPSPSTSANVPSTATTGKRKPAKSSSNRSCVSNSNENGTLERIKKPTSAVVSSNASRRKLINYTKKHLSSHSSTNSNSKPSTASPSAHTSSSDGNNEIFTCQIMNLITNEPCGAQFSRSYDLTRHQNTIHAKRKIVFRCSECIKILGSEGYQKTFSRLDALTRHIKSKHEDLSLEQRQEVTKFAKANIGYVMG

SEQ ID NO: 247 - protein, 486 aa, Saccharomyces cerevisiae
MMNNNESEAENQRLLDELMNQTKVLQETLDFSLVTPTPHHNDDYKIHGSAYPGGETPAQQHEKLSYINTHNSNDNNNLMGSQARSNSQTPTASTIYEEAESQSSYLDDMFRTSQGGRPVTQNSISSIGQGPLRSSYSMAYDSPVDRAMNTPLQQQEGLKAELPHDFLFQHGTDDTMYNLTDDLSSSLSSSINSDMMTPNTYSSSFSYNPQSLGPASVSSTYSPKVRSPSSSFRAGSFLSSSFRHGSINTPRTRHTSISSNMTENIGPGSVPKILGGLTSDEKLRRKREFHNAVERRRRELIKQKIKELGQLVPPSLLNYDDLGKQIKPNKGIILDRTVEYLQYLAEILEIQARKKKALLAKIKELEEKKSSVAALSPFTNNHHASSGQNNSENSEERIIDIRSVPNALMNEQNSKAELHNWEPPLYDSVGNHNHAGTMESHPHTNIHEELKEFLSGDLIEAEDNAKLMFGDDNSNPADYLLEFGSG

SEQ ID NO: 248 - protein, 766 aa, Saccharomyces cerevisiae
MSEEETVSAPAPASTPAPAGTDVGSGGAAAGIANAGAEGGDGAEDVKKHGSKMLVGPRPPQNAIFIHKLYQILEDESLHDLIWWTPSGLSFMIKPVERFSKALATYFKHTNITSFVRQLNIYGFHKVSHDHSSNDANSGDDANTNDDSNTHDDNSGNKNSSGDENTGGGVQEKEKSNPTKIWEFKHSSGIFKKGDIEGLKHIKRRASSRNNSSINSRKNSSNQNYDIDSGARVRPSSIQDPSTSSNSFGNFVPQIPGANNSIPEYFNNSHVTYENANHAPLESNNPEMQEQNRPPNFQDETLKHLKEINFDMVKIIESMQHFISLQHSFCSQSFTFKNVSKKKSENIVKDHQKQLQAFESDMLTFKQHVMSRAHRTIDSLCAVNAAATAASVAPAPAPTSTSAYAPKSQYEMMVPPGNQYVPQKSSSTTNIPSRFNTASVPPSQLFVQYQPQSQQHVTYAKQPAHVPNFINQPIPIQQLPPQYADTFSTPQMMHNPFASKNNNKPGNTKRTNSVLMDPLTPAASVGVQGPLNYPIMNINPSVRDYNKPVPQNMAPSPIYPINEPTTRLYSQPKMRSLGSTSSLPNDRRNSPLKLTPRSSLNEDSLYPKPRNSLKSSISGTSLSSSFTLVANNPAPIRYSQQGLLRSLNKAANCAPDSVTPLDSSVLTGPPPKNMDNLPAVSSNLINSPMNVEHSSSLSQAEPAPQIELPQPSLPTTSTTKNTGEADNSKRKGSGVYSLLNQEDSSTSSADPKTEDKAAPALKKVKM

SEQ ID NO: 249 - protein, 683 aa, Saccharomyces cerevisiae
MDFTTMTMASNMATSTTTTATSAHASINSSSNFNIDIDSNQNTPSILINNNSDSSNGKNTDFNGVNNIHQKNIMNNTNNVHLYSPNIMDQTLLTPQDIAKLRRESIAHSQGMGGVSWGSISVGSWLRDEIISRRNSIVPASANGAASAAASATTTATNTLQIQQPTKRPSVSNPPYHRGYSISPQIAYTAYLPNLEKQYCKDYSCCGLSLPGLHDLLRHYEEAHISTSPNTTNMSQIPMNSAGNTSSSVRMTNNTSSANYNLQNNMAANTKNAGHKTNTMQAHSSNATNNTSINNMHANLQSNMDSNSTIRQSQHPHHQQNIIQQQLQSNSVNHTSGAVPTPSVMGSATASSTTANPNVISITGAPNSGLSMANHSQQLHLNGNLVDAVSTNDVFLRTSNSPSRHVPHNKQINSNNNSGININNNTSHNSNINMGSKNAMVNRPHTFNNYSLNKTSRNPIQHQSRKIDPHQTDLSPLVLVQDIDLSFMDDDILGPSNHNSMNSVVNPTTGSHNYNTFHSSVHAKSSQNMVEDQDIDDIDDDDDVDDDDDDDDDDDTENGSSSNGKSVHNNNYKMPQQAYIDDPARRLYVMDHEEQKPFKCPVIGCEKTYKNQNGLKYHRLHGHQNQKLHENPDGTFSVIDPDSTDSFGDGMGSAKDKPYRCEVCGKRYKNLNGLKYHRGHSTH

SEQ ID NO: 250 - protein, 647 aa, Saccharomyces cerevisiae
MSSEERSRQPSTVSTFDLEPNPFEQSFASSKKALSLPGTISHPSLPKELSRNNSTSTITQHSQRSTHSLNSIPEENGNSTVTDNSNHNDVKKDSPSFLPGQQRPTIISPPILTPGGSKRLPPLLLSPSILYQANSTTNPSQNSHSVSVSNSNPSAIGVSSTSGSLYPNSSSPSGTSLIRQPRNSNVTTSNSGNGFPTNDSQMPGFLLNLSKSGLTPNESNIRTGLTPGILTQSYNYPVLPSINKNTITGSKNVNKSVTVNGSIENHPHVNIMHPTVNGTPLTPGLSSLLNLPSTGVLANPVFKSTPTTNTTDGTVNNSISNSNFSPNTSTKAAVKMDNPAEFNAIEHSAHNHKENENLTTQIENNDQFNNKTRKRKRRMSSTSSTSKASRKNSISRKNSAVTTAPAQKDDVENNKISNNVTLDENEEQERKRKEFLERNRVAASKFRKRKKEYIKKIENDLQFYESEYDDLTQVIGKLCGIIPSSSSNSQFNVNVSTPSSSSPPSTSLIALLESSISRSDYSSAMSVLSNMKQLICETNFYRRGGKNPRDDMDGQEDSFNKDTNVVKSENAGYPSVNSRPIILDKKYSLNSGANISKSNTTTNNVGNSAQNIINSCYSVTNPLVINANSDTHDTNKHDVLSTLPHNN

SEQ ID NO: 251 - protein, 604 aa, Saccharomyces cerevisiae
MSANSPTGNDPHVFGIPVNATPSNMGSPGSPVNVPPPMNPAVANVNHPVMRTNSNSNANEGTRTLTREQIQQLQQRQRLLLQQRLLEQQRKQQALQNYEAQFYQMLMTLNKRPKRLYNFVEDADSILKKYEQYLHSFEFHIYENNYKICAPANSRLQQQQKQPELTSDGLILTKNNETLKEFLEYVARGRIPDAIMEVLRDCNIQFYEGNLILQVYDHTNTVDVTPKENKPNLNSSSSPSNNNSTQDNSKIQQPSEPNSGVANTGANTANKKASFKRPRVYRTLLKPNDLTTYYDMMSYADNARFSDSIYQQFESEILTLTKRNLSLSVPLNPYEHRDMLEETAFSEPHWDSEKKSFIHEHRAESTREGTKGVVGHIEERDEFPQHSSNYEQLMLIMNERTTTITNSTFAVSLTKNAMEIASSSSNGVRGASSSTSNSASNTRNNSLANGNQVALAAAAAAAAVGSTMGNDNNQFSRLKFIEQWRINKEKRKQQALSANINPTPFNARISMTAPLTPQQQLLQRQQQALEQQQNGGAMKNANKRSGNNATSNNNNNNNNLDKPKVKRPRKNAKKSESGTPAPKKKRMTKKKQSASSTPSSTTMS

SEQ ID NO: 252 - protein, 337 aa, Saccharomyces cerevisiae
MMDKHKYRVEIQQMMFVSGEINDPPVETTSLIEDIVRGQVIEILLQSNKTAHLRGSRSILPEDVIFLIRHDKAKVNRLRTYLSWKDLRKNAKDQDASAGVASGTGNPGAGGEDDLKKAGGGEKDEKDGGNMMKVKKSQIKLPWELQFMFNEHPLENNDDNDDMDEDEREANIVTLKRLKMADDRTRNMTKEEYVHWSDCRQASFTFRKNKRFKDWSGISQLTEGKPHDDVIDILGFLTFEIVCSLTETALKIKQREQVLQTQKDKSQQSSQDNTNFEFASSTLHRKKRLFDGPENVINPLKPRHIEEAWRVLQTIDMRHRALTNFKGGRLSSKPIIM

SEQ ID NO: 253 - protein, 1332 aa, Saccharomyces cerevisiae
MTERIPIKNYQRTNAKALLKLTEKLFNKNFFDLYLTSQQLVVLEYLLSISSEEDKLKAWDYFLKGNIALNVEKSFPLTQEEEHHGAVSPAVDTRSDDVSSQTIKDNNNTNTNTSISNENHVENEIEDKGDNAIANEDNFVNNDESDNVEEDLFKLDLEDLKQQISGTRFIGNLSLKIRYVLWQCAIDYIYCDRNEFGDENDTEYTLLDVEEKEEEEIGKNEKPQNKEGISKFAEDEDYDDEDENYDEDSTDVKNVDDPPKNLDSISSSNIEIDDERRLVLNISISKETLSKLKTNNVEEIMGNWNKIYHSFEYDKETMIKRLKLEESDKMIEKGKKKRSRSDLEAATDEQDRENTNDEPDTNQKLPTPEGSTFSDTGNKRPKQSNLDLTVNLGIENLSLKHLLSSIQQKKSQLGISDYELKHLIMDVRKNRSKWTSDERIGQEELYEACEKVVLELRNYTEHSTPFLNKVSKREAPNYHQIIKKSMDLNTVLKKLKSFQYDSKQEFVDDIMLIWKNCLTYNSDPSHFLRGHAIAMQKKSLQLIRMIPNITIRNRADLEKEIEDMEKDKDYELDEEEEVAGSGRKGLNMGAHMLAKENGKVSEKDSSKTVKDEAPTNDDKLTSVIPEGEKEKDKTASSTVTVHENVNKNEIKENGKNEEQDMVEESSKTEDSSKDADAAKKDTEDGLQDKTAENKEAGENNEEEEDDDDEDEDEDMVDSQSYLLEKDDDRDDLEISVWKTVTAKVRAEICLKRTEYFKNGKLNSDSEAFLKNPQRMKRFDQLFLEYKEQKALESYRQKIEQNSIMKNGFGTVLKQEDDDQLQFHNDHSLNGNEAFEKQPNDIELDDTRFLQEYDISNAIPDIVYEGVNTKTLDKMEDASVDRMLQNGINKQSRFLANKDLGLTPKMNQNITLIQQIRHICHKISLIRMLQSPLSAQNSRSNPNAFLNNHIYNYTIIDDSLDIDPVSQLPTHDYKNNRELIWKFMHKNISKVAMANGFETAHPSAINMLTEIAGDYLSNLIKTLKLHHETNSLNRGTNVEMLQTTLLENGINRPDDLFSYVESEFGKKTKKLQDIKQKLESFLRALLRPTLQELSERNFEDESQSFFTGDFASELTGEDFFGFRELGLEKEFGVLSSSVPLQLLTTQFQTVDGETKVQAKKIQPEESDSIVYKKITKGMLDAGSFWNTLLPLLQKDYERSKAYIAKQSKSSANDKTSMTSTEDNSFALLEEDQFVSKKTATKARLPPTGKISTTYKKKPIASAFILPEEDLENDVKADPTTTVNAKVGAENDGDSSLFLRTPQPLDPLDMDDAFDDTNMGSNSSFSLSLPRLNQ

SEQ ID NO: 254 - protein, 210 aa, Saccharomyces cerevisiae
MGKSAVIFVERATPATLTELKDALSNSILSVRDPWSIDFRTYRCSIKNLPADVSKLMYSITFHHHGRQTVLIKDNSAMVTTAAAADIPPALVFNGSSTGVPESIDTILSSKLSNIWMQRQLIKGDAGETLILDGLTVRLVNLFSSTGFKGLLIELQADEAGEFETKIAGIEGHLAEIRAKEYKTSSDSLGPDTSNEICDLAYQYVRALEL

SEQ ID NO: 255 - protein, 1427 aa, Saccharomyces cerevisiae
MNNGSGRYLLTPPDDLHPYVPSSKPQEQVYPDFKPWEHTAAEDQILANFVAKGFYHTPMVNFESISARSSVHESLVTQSNILSQQFDKIIKIREDHINKIPSNSTTTLHGPGFQLPNRITLTDHRKETWLHELSSSHTSLVKIGKFIPHGLKRRQVIEQCYLKFIPLKRAIWLIKCCYFIEWKSNHKKKRSNAAGADDAISMHLLKDWTDTFVYILEKLIFDMTNHYNDSQQLRTWKRQISYFLKLLGNCYSLRLINKEIFHHWLVEFINKMENFEFLPLSLHILMIFWNDICQIDTNAPVAATITSSQKEPFFLVTKITDMLLHKYYIVSSSKSMINDENYIINDIKKNNKIKLNILKILSSLILKIFQEQSLEVFIFPTSNWEIYKPLLFEIVSNADTNQNSDMKKKLELISYRNESLKNNSSIRNVIMSASNANDFQLTIVTCKQFPKLSCIQLNCIDTQFTKLLDDNPTEFDWPTYVDQNPLTMHKIIQLILWSIHPSRQFDHYESNQLVAKLLLLRINSTDEDLHEFQIEDAIWSLVFQLAKNFSAQKRVVSYMMPSLYRLLNILITYGIIKVPTYIRKLISSGLLYLQDSNDKFVHVQLLINLKISPLMKSQYNMVLRNVMEYDVKFYEIFNFDQLVEITEQIKMRILSNDITNLQLSKTPLSIKIMVAEWYLSHLCSGILSSVNRTVLLKIFKIFCIDLEVFHHFFKWIEFIVYHQLLSDIESLEALMDILLCYQKLFSQFINDHILFTKTFIFIYKKVLKEKDVPAYNVTSFMPFWKFFMKNFPFVLKVDNDLRIELQSVYNDEKLKTEKLKNDKSEVLKVYSMINNSNQAVGQTWNFPEVFQVNIRFLLHNSEIIDTNTSKQFQKARNNVMLLIATNLKEYNKFMSIFLKRKDFTNKNLIQLISLKLLTFEVTQNVLGLEYIIRLLPINLENNDGSYGLFLKYHKEQFIKSNFEKILLTCYELEKKYHGNECEINYYEILLKILITYGSSPKLLATSTKIIMLLLNDSVENSSNILEDILYYSTCPSETDLNDIPLGSGQPDNDTVVTNDDKSDDDDHTVDEIDHVEYYVMMDFANLWVFQAFTCFCIKKIMENNEPAMAMEDLKNFIFQIIEITNSNDLCSQIFDQLKDMQTIEMITQIVEKDFCTSCLQNNNQKIDDNYIVVVIEIITSLSMRFQRETSGMIVISMENYHLLIKIIRQLSELNEGNLSKREIQIDAVLKIFSFHQDSIFQRIIADLSADKPTSPFIDSICKLFDKISFNLRLKLFLYEILSSLKSFAIYSSTIDAPAFHTSGKVELPKKLLNLPPFQVSSFVKETKLHSGDYGEEEDADQEESFSLNLGIGIVEIAHENEQKWLIYDKKDHKYVCTFSMEPYHFISNYNTKYTDDMATGSNDTTAFNDSCVNLSLFDARFERKNPH

SEQ ID NO: 256 - protein, 1420 aa, Saccharomyces cerevisiae
MSSDASTYRLEDVLSSFYRVEKIKKINYHQYISKAQNDQWSIQMEFMLRKQDPKTLVALLSRDLWCFSINDDPVPTPPAIEHKPVSPDKIGTFTADYSKPNLPPHYALFLKALRRKIYINLALGSHNKLIQFGNACISLSGVPNYLVQLEPHLFVNGDLTVSLCAKNMGLVPMKEENLEESFLSKHALYLAPSGIRMHLAPASKQGYLITPPKHTELLLTTLSVSHGINLQNKKNLKWVAVVPDLGHLNGHTPTIASYLTPLLEAKKLVWPLHLIFAQPVADIENSTSGDPSEFHCLQDALDAIDDFIQLKQTAAYRTPGSSGVLSSNIAGTNPLSSDGAYTEQFQHYKNNSISSQPASYHSVQETNKISPKDFSPNFTGIDKLMLSPSDQFAPAFLNTPNNNINENELFNDRKQTTVSNDLENSPLKTELEANGRSLEKVNNSVSKTGSVDTLHNKEGTLEQREQNENLPSDKSDSMVDKELFGEDEDEDLFGDSNKSNSTNESNKSISDEITEDMFEMSDEEENNNNKSINKNNKEMHTDLGKDIPFFPSSEKPNIRTMSGTTKRLNGKRKYLDIPIDEMTLPTSPLYMDPGAPLPVETPRDRRKSVFAPLNFNPIIENNVDNKYKSGGKFSFSPLQKEEALNFDISMADLSSSEEEEDEEENGSSDEDLKSLNVRDDMKPSDNISTNTNIHEPQYINYSSIPSLQDSIIKQENFNSVNDANITSNKEGFNSIWKIPQNDIPQTESPLKTVDSSIQPIESNIKMTLEDNNVTSNPSEFTPNMVNSEISNLPKDKSGIPEFTPADPNLSFESSSSLPFLLRHMPLASIPDIFITPTPVVTISEKEQDILDLIAEQVVTDYNILGNLGIPKIAYRGVKDCQEGLITTTMLQLFSTFDRLNGNDTISKFYNMKQPYVFVKKHHELIKVKHDSQPFIKFLNFRPPNGIKNFKSLLLSSSFKEDCLSFAPTLSQTYINQELGFCELLKLTNEDPPGLMYLKAFDKNKLLLLAAQIVSYCSNNKNSIKNVPPILIILPLDNATLTELVDKANIFQVIKNEVCAKMPNIELYLKVIPMDFIRNVLVTVDQYVNVAISIYNMLPPKSVKFTHIAHTLPEKVNFRTMQQQQMQQQQQQQQQQQNNSTGSSSIIYYDSYIHLAYSRSVDKEWVFAALSDSYGQGSMTKTWYVGNSRGKFDDACNQIWNIALNLASKKFGKICLILTRLNGILPDDELMNWRRLSGRNIHLAVVCVDDNSKISFIDEDKLYPSFKPIYKDTRFGGRMDMTRLYDYEIRDIDQDIHGIVFQHPFPLAHSQHRCAIRSGALIKFKKCDGDTVWDKFAVNLLNCPHSDSTQLLETILEEFRNLAALNVWYGLSDGEDGHIPWHILAVKKMMNTLVHTRVKIANTSAATVHTATSSSIILSDK

SEQ ID NO: 257 - protein, 519 aa, Saccharomyces cerevisiae
MPSTTLLFPQKHIRAIPGKIYAFFRELVSGVIISKPDLSHHYSCENATKEEGKDAADEEKTTTSLFPESNNIDRSLNGGCSVIPCSMDVSDLNTPISITLSPENRIKSEVNAKSLLGSRPEQDTGAPIKMSTGVTSSPLSPSGSTPEHSTKVLNNGEEEFICHYCDATFRIRGYLTRHIKKHAIEKAYHCPFFNSATPPDLRCHNSGGFSRRDTYKTHLKARHVLYPKGVKPQDRNKSSGHCAQCGEYFSTIENFVENHIESGDCKALPQGYTKKNEKRSGKLRKIKTSNGHSRFISTSQSVVEPKVLFNKDAVEAMTIVANNSSGNDIISKYGNNKLMLNSENFKVDIPKRKRKYIKKKQQQVSGSTVTTPEVATQNNQEVAPDEISSATIFSPFDTHLLEPVPSSSSESSAEVMFHGKQMKNFLIDINSFTNQQQQAQDNPSFLPLDIEQSSYDLSEDAMSYPIISTQSNRDCTQYDNTKISQILQSQLNPEYLSENHMRETQQYLNFYNDNFGSQF

SEQ ID NO: 258 - protein, 1093 aa, Saccharomyces cerevisiae
MPFDVLISNQKDNTNHQNITPISKSVLLAPHSNHPVIEIATYSETDVYECYIRGFETKIVMRRTKDDWINITQVFKIAQFSKTKRTKILEKESNDMQHEKVQGGYGRFQGTWIPLDSAKFLVNKYEIIDPVVNSILTFQFDPNNPPPKRSKNSILRKTSPGTKITSPSSYNKTPRKKNSSSSTSATTTAANKKGKKNASINQPNPSPLQNLVFQTPQQFQVNSSMNIMNNNDNHTTMNFNNDTRHNLINNISNNSNQSTIIQQQKSIHENSFNNNYSATQKPLQFFPIPTNLQNKNVALNNPNNNDSNSYSHNIDNVINSSNNNNNGNNNNLIIVPDGPMQSQQQQQHHHEYLTNNFNHSMMDSITNGNSKKRRKKLNQSNEQQFYNQQEKIQRHFKLMKQPLLWQSFQNPNDHHNEYCDSNGSNNNNNTVASNGSSIEVFSSNENDNSMNMSSRSMTPFSAGNTSSQNKLENKMTDQEYKQTILTILSSERSSDVDQALLATLYPAPKNFNINFEIDDQGHTPLHWATAMANIPLIKMLITLNANALQCNKLGFNCITKSIFYNNCYKENAFDEIISILKICLITPDVNGRLPFHYLIELSVNKSKNPMIIKSYMDSIILSLGQQDYNLLKICLNYQDNIGNTPLHLSALNLNFEVYNRLVYLGASTDILNLDNESPASIMNKFNTPAGGSNSRNNNTKADRKLARNLPQKNYYQQQQQQQQPQNNVKIPKIIKTQHPDKEDSTADVNIAKTDSEVNESQYLHSNQPNSTNMNTIMEDLSNINSFVTSSVIKDIKSTPSKILENSPILYRRRSQSISDEKEKAKDNENQVEKKKDPLNSVKTAMPSLESPSSLLPIQMSPLGKYSKPLSQQINKLNTKVSSLQRIMGEEIKNLDNEVVETESSISNNKKRLITIAHQIEDAFDSVSNKTPINSISDLQSRIKETSSKLNSEKQNFIQSLEKSQALKLATIVQDEESKVDMNTNSSSHPEKQEDEEPIPKSTSETSSPKNTKADAKFSNTVQESYDVNETLRLATELTILQFKRRMTTLKISEAKSKINSSVKLDKYRNLIGITIENIDSKLDDIEKDLRANA

SEQ ID NO: 259 - protein, 291 aa, Saccharomyces cerevisiae
MNSILDRNVRSSETTLIKPESEFDNWLSDENDGASHINVNKDSSSVLSASSSTWFEPLENIISSASSSSIGSPIEDQFISSNNEESALFPTDQFFSNPSSYSHSPEVSSSIKREEDDNALSLADFEPASLQLMPNMINTDNNDDSTPLKNEIELNDSFIKTNLDAKETKKRAPRKRLTPFQKQAHNKIEKRYRININTKIARLQQIIPWVASEQTAFEVGDSVKKQDEDGAETAATTPLPSAAATSTKLNKSMILEKAVDYILYLQNNERLYEMEVQRLKSEIDTLKQDQK

SEQ ID NO: 260 - protein, 528 aa, Saccharomyces cerevisiae
MNYGVEKLKLKYSKHGCITCKIRKKRCSEDKPVCRDCRRLSFPCIYISESVDKQSLKKIKADIQHQLISKKRKHAPDSAQKAAVATRTRRVGSDEQDNQVYLSKPLEDCISQKLDSMGLQLYNYYRSHLANIISIAPMNQNYYLNIFLPMAHENDGILFAILAWSANHLSISSSNELRKDEIFVNLANKYTYMSLSHLKTNEGSSACAKLGFLYSLAQILILCGSEICQGDVKFWKILLNIGKNLIENHVGKDVSRILTTTTEEPSLEERIIFPNFNSVVKYWLIVNFIYHDILNFNTTSFPIEQYEKFFQRDQNSLPSSANFIESIDSPIEEIDPLIGINKPILLLLGQVTNLTRFLQTMEQEEMLEHGDKILSLQVEIYKLQPSLMALEHLDDEKKFYYLELFEIMKISTLMFFQLTLLKIDKDSLELQILRNKLDSKLDKVIGTFLEGSLCFPLFIYGVCIQVEDMEKKIDLEAKFDDILKRYKCYNFQNARLLIRKIWQNEADGISEHDLVHMIDELDYNINFA

SEQ ID NO: 261 - protein, 836 aa, Saccharomyces cerevisiae
MLDKARSQSKHMDESNAAASLLSMETTANNHHYLHNKTSRATLMNSSQDGKKHAEDEVSDGANSRHPTISSASIESLKTTYDENPLLSIMKSTCAPNNTPVHTPSGSPSLKVQSGGDIKDDPKENDTTTTTNTTLQDRRDSDNAVHAAASPLAPSNTPSDPKSLCNGHVAQATDPQISGAIQPQYTATNEDVFPYSSTSTNSNTATTTIVAGAKKKIHLPPPQAPAVSSPGTTAAGSGAGTGSGIRSRTGSDLPLIITSANKNNGKTTNSPMSILSRNNSTNNNDNNSIQSSDSRESSNNNEIGGYLRGGTKRGGSPSNDSQVQHNVHDDQCAVGVAPRNFYFNKDREITDPNVKLDENESKINISFWLNSKYRDEAYSLNESSSNNASSNTDTPTNSRHANTSSSITSRNNFQHFRFNQIPSQPPTSASSFTSTNNNNPQRNNINRGEDPFATSSRPSTGFFYGDLPNRNNRNSPFHTNEQYIPPPPPKYINSKLDGLRSRLLLGPNSASSSTKLDDDLGTAAAVLSNMRSSPYRTHDKPISNVNDMNNTNALGVPASRPHSSSFPSKGVLRPILLRIHNSEQQPIFESNNSTAVFDEDQDQNQDLSPYHLNLNSKKVLDPTFESRTRQVTWNKNGKRIDRRLSAPEQQQQLEVPPLKKSRRSVGNARVASQTNSDYNSLGESSTSSAPSSPSLKASSGLAYTADYPNATSPDFAKSKGKNVKPKAKSKAKQSSKKRPNNTTSKSKANNSQESNNATSSTSQGTRSRTGCWICRLRKKKCTEERPHCFNCERLKLDCHYDAFKPDFVSDPKKKQMKLEEIKKKTKEAKRRAMKKK

SEQ ID NO: 262 - protein, 385 aa, Saccharomyces cerevisiae
MSQETKMLPSLSSLLSGTEISSSPVSPSFTNPRTSFHLDDRGTIKLPPLNTSINRPRSVESALRHTVTSLHENSSAYGDDMLKHTQSDSALSSQLNSSQETVDESHENLLLTPLNSKKRDYSVSSKKNDILTPLSAAKSIIIPSASKEKRRAFAFITHSQETFPKKEPKIDNAPLARRKRRRTSSQELSILQAEFEKCPAPSKEKRIELAESCHMTEKAVQIWFQNKRQAVKRQRIATSKSTTIIQTVSPPSPPLDVHATPLASRVKADILRDGSSCSRSSSSSPLENTPPRPHHSLNRRSSTPSIKRSQALTFHLNPQKKTLTPVKTSPNSRVNKLINSIDHSPSKAKRPVSNPSGSPKRKRKFGFKIVDQQPLKDLDPNAFRG

SEQ ID NO: 263 - protein, 298 aa, Saccharomyces cerevisiae
MSGELANYKRLEKVGEGTYGVVYKALDLRPGQGQRVVALKKIRLESEDEGVPSTAIREISLLKELKDDNIVRLYDIVHSDAHKLYLVFEFLDLDLKRYMEGIPKDQPLGADIVKKFMMQLCKGIAYCHSHRILHRDLKPQNLLINKDGNLKLGDFGLARAFGVPLRAYTHEIVTLWYRAPEVLLGGKQYSTGVDTWSIGCIFAEMCNRKPIFSGDSEIDQIFKIFRVLGTPNEAIWPDIVYLPDFKPSFPQWRRKDLSQVVPSLDPRGIDLLDKLLAYDPINRISARRAAIHPYFQES

SEQ ID NO: 264 - protein, 245 aa, Saccharomyces cerevisiae
MALPLIKPKESEESHLALLSKIHVSKNWKLPPRLPHRAAQRRKRVHRLHEDYETEENDEELQKKKRQNRDAQRAYRERKNNKLQVLEETIESLSKVVKNYETKLNRLQNELQAKESENHALKQKLETLTLKQASVPAQDPILQNLIENFKPMKAIPIKYNTAIKRHQHSTELPSSVKCGFCNDNTTCVCKELETDHRKSDDGVATEQKDMSMPHAECNNKDNPNGLCSNCTNIDKSCIDIRSIIH

SEQ ID NO: 265 - protein, 383 aa, Saccharomyces cerevisiae
MQNPPLIRPDMYNQGSSSMATYNASEKNLNEHPSPQIAQPSTSQKLPYRINPTTTNGDTDISVNSNPIQPPLPNLMHLSGPSDYRSMHQSPIHPSYIIPPHSNERKQSASYNRPQNAHVSIQPSVVFPPKSYSISYAPYQINPPLPNGLPNQSISLNKEYIAEEQLSTLPSRNTSVTTAPPSFQNSADTAKNSADNNDNNDNVTKPVPDKDTQLISSSGKTLRNTRRAAQNRTAQKAFRQRKEKYIKNLEQKSKIFDDLLAENNNFKSLNDSLRNDNNILIAQHEAIRNAITMLRSEYDVLCNENNMLKNENSIIKNEHNMSRNENENLKLENKRFHAEYIRMIEDIENTKRKEQEQRDEIEQLKKKIRSLEEIVGRHSDSAT

SEQ ID NO: 266 - protein, 587 aa, Saccharomyces cerevisiae
MFTGQEYHSVDSNSNKQKDNNKRGIDDTSKILNNKIPHSVSDTSAAATTTSTMNNSALSRSLDPTDINYSTNMAGVVDQIHDYTTSNRNSLTPQYSIAAGNVNSHDRVVKPSANSNYQQAAYLRQQQQQDQRQQSPSMKTEEESQLYGDILMNSGVVQDMHQNLATHTNLSQLSSTRKSAPNDSTTAPTNASNIANTASVNKQMYFMNMNMNNNPHALNDPSILETLSPFFQPFGVDVAHLPMTNPPIFQSSLPGCDEPIRRRRISISNGQISQLGEDIETLENLHNTQPPPMPNFHNYNGLSQTRNVSNKPVFNQAVPVSSIPQYNAKKVINPTKDSALGDQSVIYSKSQQRNFVNAPSKNTPAESISDLEGMTTFAPTTGGENRGKSALRESHSNPSFTPKSQGSHLNLAANTQGNPIPGTTAWKRARLLERNRIAASKCRQRKKVAQLQLQKEFNEIKDENRILLKKLNYYEKLISKFKKFSKIHLREHEKLNKDSDNNVNGTNSSNKNESMTVDSLKIIEELLMIDSDVTEVDKDTGKIIAIKHEPYSQRFGSDTDDDDIDLKPVEGGKDPDNQSLPNSEKIK

SEQ ID NO: 267 - protein, 936 aa, Saccharomyces cerevisiae
MDGEMAIIESSNHVGTSSPTTETQFTIDSSALKDQETKESITNSPTSEVPIETKLPKSSDIVTEEKHPQNTTTDIENEVENPVTDDNGNLKLELPDNLDNADFSKLLEFDAKNDEALFNSNELLSHTMDPVNNIDLTHDHSREVSSKEDINIEPVNPDEDEREKTQDNTAAVKTEGIRNSEDTSIQKDEPTADAIYTDVHKLSVNKDTETLPTLVDEKNNMLHMRNNSITPIMFQQHELVGQPPQNTVTENNSTDAETTQRKLSEPIDASLPLPNEQPTIFAYARLDFQSFTFYVQTLHAIIGRRSENDFSHKVDVNLGPSKSISRRHAQIFYNFGTGRFELSIIGKNGAFVDDIFVEKGNTVPLRNKTKIQIGQIPFQFILPEQERNDDSKSPENADIAESEINTRNLKKNEPKSKKKITTGAKPKKAQTKPAVKKEKKPPKIPKKVYTLEEIPVEYRTKPTVSYSAMLTTCIRKYSTAKGMSLSEIYAGIRELFPYYKYCPDGWQSSVRHNLSLNKSFRKVSKEGKGWLWGLDEEYIAERERQKKKQSEIAVAKAQAAQLKLEQQQHKLQQVPQRGKKDIVSQRSNVNARKQNISQTLAANRAASNRKNTASDNQRTMKYLQEQLVILTRDRKGLSKQVIAAILTQALAMTINQVTQAAKNKGITGNPLTALMDKNPQHLNLILAAAVNAATAKVTKGEVKQLVNPETTAAAALAAKAQHSKPIRQPIVQTPHVPDRPPSQLSASASSHPNNYLHDKQPGSFDPSSLSRFFQPRQNARATSSVAATSVPAAASQNVDAQPKPKPAQDNDLESESGTSSSSSSSSESGSESDSGSDDGSASGSGDNSSTSSESESESDSGSEVDEKNNKNEKIDSESIKNNESKDDIPSKDENSSNDNREISKTDEEGHDSKRRKVSEDINEGITEVNVSLEEKL

SEQ ID NO: 268 - protein, 281 aa, Saccharomyces cerevisiae [sequence omitted]

SEQ ID NO: 269 - protein, 886 aa, Saccharomyces cerevisiae
MEGRSDFVATSQSGSEMSHSETRNRTGMNARKRKFACVECRQQKSKCDAHERAPEPCTKCAKKNVPCILKRDFRRTYKRARNEAIEKRFKELTRTLTNLTSDEILKKIEEEQEIVLDNSNFTKEKVKQLRKSAFETTEIEPRSYKTLRGEPISYSTNRRHTDSSPLTLLSSSTNFDPVHSTNVMTDDQLKCLPKSLGDVYLSSSDIAELFQEFATKYHQFLPVVDLSKGAERIYHLSPCLFWVILLIGLRRKFGATDLMTRLSVLVKSVLSEITISPIIRYTPSDKDEPVLNVASVYSVQAFLLYTFWPPLTSSLSADTSWNTIGTAMFQALRVGLNCAGFSKEYASANSELVNEQIRTWICCNVVSQTVASSFGFPAYVSFDYLVISSIRVPNSKSQVDIPNELRQMAQIARFENQIVNTMNSTPASVTGMVSQEEKQPLLHVLNQQLSQLEISLEENNLDDIRKFLLLVAKVHLLTYYFTDVTSQSAGKSNGNIYEGSYSIMELDTSFETKRGLVKVYNAAVNFLIHANSMWEHDPTIIKYFPGLFVLNIWQSACIISKLIHSSLHSMLDVNSGKKAYNNAISLTFNASVLKYDMAYRSSGIMRSIWSLFANMYDAWKNDQKEGGGRLNNDFNLGITIKSRMSVNVFFDCLYILKEKCGMAKLERETKVSTAYNVDEEEEEDEDEEGEEEEEEEELSSKVPENMDSQQLRTRKFTNVRHPEKKARKIIETIPLDPNPINAGSTSSGSSLTTPNSQVANTISYRGILNKMSPREQLNHANLDSSVSTDIKDTEAVNEPLPIGRNAEHPANQPPLSITQMQENTLPATQANSSLLETYPIVQSNPVTTTIKESPNSIMAGWDNWESDMVWRDVDILMNEFAFNPKV

SEQ ID NO: 270 - protein, 177 aa, Saccharomyces cerevisiae
MKLAQDMNVDEIFLKQAAEAIAVISSSPTHTDPIIRELLHRIRQSSPLSAVIPAPENVLKAGEPENMARGLIRIPETQTKRTGGNNHSKEGAQLYSCAKCQLKFSRSSDLRRHEKVHSLVLPHICSNCGKGFARKDALKRHSNTLTCQRNRKKLSEGSDVDVDELIKDAIKNGTGLL

SEQ ID NO: 271 - protein, 410 aa, Saccharomyces cerevisiae
MSTADQEQPKVVEATPEDGTASSQKSTINAENENTKQNQSMEPQETSKGTSNDTKDPDNGEKNEEAAIDENSNVEAAERKRKHISTDFSDDDLEKEEHNDQSLQPTVENRASKDRDSSATPSSRQELEEKLDRILKKPKVRRTRRDEDDLEQYLDEKILRLKDEMNIAAQLDIDTLNKRIETGDTSLIAMQKVKLLPKVVSVLSKANLADTILDNNLLQSVRIWLEPLPDGSLPSFEIQKSLFAALNDLPVKTEHLKESGLGRVVIFYTKSKRVEAQLARLAEKLIAEWTRPIIGASDNYRDKRIMQLEFDSEKLRKKSVMDSAKNRKKKSKSGEDPTSRGSSVQTLYEQAAARRNRAAAPAQTTTDYKYAPVSNLSAVPTNARAVGVGSTLNNSEMYKRLTSRLNKKHK

SEQ ID NO: 272 - protein, 1451 aa, Saccharomyces cerevisiae
MEETGDSKLVPRDEEEIVNDNDETKAPSEEEEGEDVFDSSEEDEDIDEDEDEARKVQEGFIVNDDDENEDPGTSISKKRRKHKRREREEDDRLSEDDLDLLMENAGVERTKASSSSGKFKRLKRVGDEGNAAESESDNVAASRQDSTSKLEDFFSEDEEEEESGLRNGRNNEYGRDEEDHENRNRTADKGGILDELDDFIEDDEFSDEDDETRQRRIQEKKLLREQSIKQPTQITGLSSDKIDEMYDIFGDGHDYDWALEIENEELENGNDNNEAEEEEIDEETGAIKSTKKKISLQDIYDLEDLKKNLMTEGDMKIRKTDIPERYQELRAGITDYGNMSSEDQELERNWIAEKISVDKNFDANYDLTEFKEAIGNAIKFITKENLEVPFIYAYRRNYISSREKDGFLLTEDDLWDIVSLDIEFHSLVNKKDYVQRFYAELHIDDPIVTEYFKNQNTASIAELNSLQDIYDYLEFKYANEINEMFINHTGKTGKKHLKNSSYEKFKASPLYQAVSDIGISAEDVGENISSQHQIHPPVDHPSSKPVEVIESILNANSGDLQVFTSNTKLAIDTVQKYYSLELSKNTKIREKVRSDFSKYYLADVVLTAKGKKEIQKGSLYEDIKYAINRTPMHFRRDPDVFLKMVEAESLNLLSVKLHMSSQAQYIEHLFQIALETTNTSDIAIEWNNFRKLAFNQAMDKIFQDISQEVKDNLTKNCQKLVAKTVRHKFMTKLDQAPFIPNVRDPKIPKILSLTCGQGRFGADAIIAVYVNRKGDFIRDYKIVDNPFDKTNPEKFEDTLDNIIQSCQPNAIGINGPNPKTQKFYKRLQEVLHKKQIVDSRGHTIPIIYVEDEVAIRYQNSERAAQEFPNKPPLVKYCIALARYMHSPLLEYANLTSEEVRSLSIHPHQNLLSSEQLSWALETAFVDIVNLVSVEVNKATDNNYYASALKYISGFGKRKAIDFLQSLQRLNEPLLARQQLITHNILHKTIFMNSAGFLYISWNEKRQKYEDLEHDQLDSTRIHPEDYHLATKVAADALEYDPDTIAEKEEQGTMSEFIELLREDPDRRAKLESLNLESYAEELEKNTGLRKLNNLNTIVLELLDGFEELRNDFHPLQGDEIFQSLTGESEKTFFKGSIIPVRVERFWHNDIICTTNSEVECVVNAQRHAGAQLRRPANEIYEIGKTYPAKVIYIDYANITAEVSLLDHDVKQQYVPISYSKDPSIWDLKQELEDAEEERKLMMAEARAKRTHRVINHPYYFPFNGRQAEDYLRSKERGEFVIRQSSRGDDHLVITWKLDKDLFQHIDIQELEKENPLALGKVLIVDNQKYNDLDQIIVEYLQNKVRLLNEMTSSEKFKSGTKKDVVKFIEDYSRVNPNKSVYYFSLNHDNPGWFYLMFKINANSKLYTWNVKLTNTGYFLVNYNYPSVIQLCNGFKTLLKSNSSKNRMNNYR

SEQ ID NO: 273 - protein, 435 aa, Saccharomyces cerevisiae
MVVNTIYIARHGYRSNWLPEGPYPDPLTGIDSDVPLAEHGVQQAKELAHYLLSLDNQPEAAFASPFYRCLETVQPIAKLLEIPVYLERGIGEWYRPDRKPVIPVPAGYEILSKFFPGVISQEWDSTLTPNEKGETEQEMYMRFKKFWPLFIERVEKEYPNVECILLVTHAASKIALGMSLLGYDNPRMSLNENGDKIRSGSCSLDKYEILKKSYDTIDETDDQTSFTYIPFSDRKWVLTMNGNTEFLSSGEEMNWNFDCVAEAGSDADIKKRQMTKKTSSPIPEADDQTEVETVYISVDIPSGNYKERTEIAKSAILQYSGLETDAPLFRIGNRLYEGSWERLVGTELAFPNAAHVHKKTAGLLSPTEENETTNAGQSKGSSTANDPNIQIQEEDVGLPDSTNTSRDHTGDKEEVQSEKIYRIKERIVLSNVRPM

SEQ ID NO: 274 - protein, 713 aa, Saccharomyces cerevisiae
MTASVSNTQNKLNELLDAIRQEFLQVSQEANTYRLQNQKDYDFKMNQQLAEMQQIRNTVYELELTHRKMKDAYEEEIKHLKLGLEQRDHQIASLTVQQQRQQQQQQQVQQHLQQQQQQLAAASASVPVAQQPPATTSATATPAANTTTGSPSAFPVQASRPNLVGSQLPTTTLPVVSSNAQQQLPQQQLQQQQLQQQQPPPQVSVAPLSNTAINGSPTSKETTTLPSVKAPESTLKETEPENNNTSKINDTGSATTATTTTATETEIKPKEEDATPASLHQDHYLVPYNQRANHSKPIPPFLLDLDSQSVPDALKKQTNDYYILYNPALPREIDVELHKSLDHTSVVCCVKFSNDGEYLATGCNKTTQVYRVSDGSLVARLSDDSAANNHRNSITENNTTTSTDNNTMTTTTTTTITTTAMTSAAELAKDVENLNTSSSPSSDLYIRSVCFSPDGKFLATGAEDRLIRIWDIENRKIVMILQGHEQDIYSLDYFPSGDKLVSGSGDRTVRIWDLRTGQCSLTLSIEDGVTTVAVSPGDGKYIAAGSLDRAVRVWDSETGFLVERLDSENESGTGHKDSVYSVVFTRDGQSVVSGSLDRSVKLWNLQNANNKSDSKTPNSGTCEVTYIGHKDFVLSVATTQNDEYILSGSKDRGVLFWDKKSGNPLLMLQGHRNSVISVAVANGSPLGPEYNVFATGSGDCKARIWKYKKIAPN

SEQ ID NO: 275 - protein, 437 aa, Saccharomyces cerevisiae
MPKKVWKSSTPSTYEHISSLRPKFVSRVDNVLHQRKSLTFSNVVVPDKKNNTLTSSVIYSQGSDIYEIDFAVPLQEAASEPVKDYGDAFEGIENTSLSPKFVYQGETVSKMAYLDKTGETTLLSMSKNGSLAWFKEGIKVPIHIVQELMGPATSYASIHSLTRPGDLPEKDFSLAISDFGISNDTETIVKSQSNGDEEDSILKIIDNAGKPGEILRTVHVPGTTVTHTVRFFDNHIFASCSDDNILRFWDTRTSDKPIWVLGEPKNGKLTSFDCSQVSNNLFVTGFSTGIIKLWDARAAEAATTDLTYRQNGEDPIQNEIANFYHAGGDSVVDVQFSATSSSEFFTVGGTGNIYHWNTDYSLSKYNPDDTIAPPQDATEESQTKSLRFLHKGGSRRSPKQIGRRNTAAWHPVIENLVGTVDDDSLVSIYKPYTEESE

SEQ ID NO: 276 - protein, 650 aa, Saccharomyces cerevisiae
MSVSTAKRSLDVVSPGSLAEFEGSKSRHDEIENEHRRTGTRDGEDSEQPKKKGSKTSKKQDLDPETKQKRTAQNRAAQRAFRERKERKMKELEKKVQSLESIQQQNEVEATFLRDQLITLVNELKKYRPETRNDSKVLEYLARRDPNLHFSKNNVNHSNSEPIDTPNDDIQENVKQKMNFTFQYPLDNDNDNDNSKNVGKQLPSPNDPSHSAPMPINQTQKKLSDATDSSSATLDSLSNSNDVLNNTPNSSTSMDWLDNVIYTNRFVSGDDGSNSKTKNLDSNMFSNDFNFENQFDEQVSEFCSKMNQVCGTRQCPIPKKPISALDKEVFASSSILSSNSPALTNTWESHSNITDNTPANVIATDATKYENSFSGFGRLGFDMSANHYVVNDNSTGSTDSTGSTGNKNKKNNNNSDDVLPFISESPFDMNQVTNFFSPGSTGIGNNAASNTNPSLLQSSKEDIPFINANLAFPDDNSTNIQLQPFSESQSQNKFDYDMFFRDSSKEGNNLFGEFLEDDDDDKKAANMSDDESSLIKNQLINEEPELPKQYLQSVPGNESEISQKNGSSLQNADKINNGNDNDNDNDVVPSKEGSLLRCSEIWDRITTHPKYSDIDVDGLCSELMAKAKCSERGVVINAEDVQLALNKHMN

SEQ ID NO: 277 - protein, 383 aa, Saccharomyces cerevisiae; identical to SEQ ID NO: 265

SEQ ID NO: 278 - protein, 409 aa, Saccharomyces cerevisiae
MGNILRKGQQIYLAGDMKKQMLLNKDGTPKRKVGRPGRKRIDSEAKSRRTAQNRAAQRAFRDRKEAKMKSLQERVELLEQKDAQNKTTTDFLLCSLKSLLSEITKYRAKNSDDERILAFLDDLQEQQKRENEKGTSTAVSKAAKELPSPNSDENMTVNTSIEVQPHTQENEKVMWNIGSWNAPSLTNSWDSPPGNRTGAVTIGDESINGSEMPDFSLDLVSNDRQTGLEALDYDIHNYFPQHSERLTAEKIDTSACQCEIDQKYLPYETEDDTLFPSVLPLAVGSQCNNICNRKCIGTKPCSNKEIKCDLITSHLLNQKSLASVLPVAASHTKTIRTQSEAIEHISSAISNGKASCYHILEEISSLPKYSSLDIDDLCSELIIKAKCTDDCKIVVKARDLQSALVRQLL

SEQ ID NO: 279 - protein, 647 aa, Saccharomyces cerevisiae
MKYPAFSINSDTVHLTDNPLDDYQRLYLVSVLDRDSPPASFSAGLNIRKVNYKSSIAAQFTHPNFIISARDAGNGEEAAAQNVLNCFEYQFPNLQTIQSLVHEQTLLSQLASSATPHSALHLHDKNILMGKIILPSRSNKTPVSASPTKQEKKALSTASRENATSSLTKNQQFKLTKMDHNLINDKLINPNNCVIWSHDSGYVFMTGIWRLYQDVMKGLINLPRGDSVSTSQQQFFCKAEFEKILSFCFYNHSSFTSEESSSVLLSSSTSSPPKRRTSTGSTFLDANASSSSTSSTQANNYIDFHWNNIKPELRDLICQSYKDFLINELGPDQIDLPNLNPANFTKRIRGGYIKIQGTWLPMEISRLLCLRFCFPIRYFLVPIFGPDFPKDCESWYLAHQNVTFASSTTGAGAATAATAAANTSTNFTSTAVARPRQKPRPRPRQRSTSMSHSKAQKLVIEDALPSFDSFVENLGLSSNDKNFIKKNSKRQKSSTYTSQTSSPIGPRDPTVQILSNLASFYNTHGHRYSYPGNIYIPQQRYSLPPPNQLSSPQRQLNYTYDHIHPVPSQYQSPRHYNVPSSPIAPAPPTFPQPYGDDHYHFLKYASEVYKQQNQRPAHNTNTNMDTSFSPRANNSLNNFKFKTNSKQ

SEQ ID NO: 280 - protein, 730 aa, Saccharomyces cerevisiae
MQDDPENSKLYDLLNSHLDVHGRSNEEPRQTGDSRSQSSGNTGENEEDIAFASGLNGGTFDSMLEALPDDLYFTDFVSPFTAAATTSVTTKTVKDTTPATNHMDDDIAMFDSLATTQPIDIAASNQQNGEIAQLWDFNVDQFNMTPSNSSGSATISAPNSFTSDIPQYNHGSLGNSVSKSSLFPYNSSTSNSNINQPSINNNSNTNAQSHHSFNIYKLQNNNSSSSAMNITNNNNSNNSNIQHPFLKKSDSIGLSSSNTTNSVRKNSLIKPMSSTSLANFKRAASVSSSISNMEPSGQNKKPLIQCFNCKTFKTPLWRRSPEGNTLCNACGLFQKLHGTMRPLSLKSDVIKKRISKKRAKQTDPNIAQNTPSAPATASTSVTTTNAKPIRSRKKSLQQNSLSRVIPEEIIRDNIGNTNNILNVNRGGYNFNSVPSPVLMNSQSYNSSNANFNGASNANLNSNNLMRHNSNTVTPNFRRSSRRSSTSSNTSSSSKSSSRSVVPILPKPSPNSANSQQFNMNMNLMNTTNNVSAGNSVASSPRIISSANFNSNSPLQQNLLSNSFQRQGMNIPRRKMSRNASYSSSFMAASLQQLHEQQQVDVNSNTNTNSNRQNWNSSNSVSTNSRSSNFVSQKPNFDIFNTPVDSPSVSRPSSRKSHTSLLSQQLQNSESNSFISNHKFNNRLSSDSTSPIKYEADVSAGGKISEDNSTKGSSKESSAIADELDWLKFGI

SEQ ID NO: 281 - protein, 1082 aa, Saccharomyces cerevisiae
MTTTIGSPQMLANEERLSNEMHALKNRSEQNGQEQQGPVKNTQLHGPSATDPETTATQKESLEMVPKDTSAATMTSAPPPALPHVEINQVSLALVIRNLTVFTMKELAQYMKTNVHTQANEPNSAKKIRFLQLIIFLRTQFLKLYVLVKWTRTIKQNNFHVLIDLLNWFRTTNMNVNNCIWALKSSLNSMTNAKLPNVDLVTALEVLSLGRPNLPTHNFKLSGVSNSMDMVDGMAKVPIGLILQRLKDLNLTVSIKIALMNIPKPLNSYHIKNGRIYFTVPNEFEIQLSTVNRQSPLFFVDLKLLFNTEAEQTVSAVTEATSTNGDSENNEENSSSNGNNLPLNKPRLEKLINEILLKSNDPLLSLYNFLHKYVLTLQLYMVHREFLKLANGGKFSKSNLIHNYDSKKSTITVRYWLNGKMDSKGKITIGIQRTTESLILKWDNQSASRAKNMPVIYNNIVSNIEGILDEIMFNHARIIRSELLARDIFQEDEENSDVLLFQLPTTCVSMAPIQLKIDLLSGQFYFRNPTPLLSNYASKINRAEGPEELARILQQLKLDKIIHVLTTMFENTGWSCSRIIKIDKPIRTQVNTGGESVVKKEDNKYAIAGNSTTNSDVSLLLQRDLFIRLPHWPLNWYLILSIISSKTSCVVEKRIGKIVSQRGKWNLKYLDNSNVMTVKLESITYQKIMILQRTILNRIINHMLIDSLNQLEIRNKICSSEMINEQKLPQYIIQGSNTNDNISIITLELESFLEGSKALNSILESSMFLRIDYSNSQIRLYAKFKRNTMMIQCQIDKLYIHFVQEEPLAFYLEESFTNLGIIVQYLTKFRQKLMQLVVLTDVVERLHKNFESENFKIIALQPNEISFKYLSNNDEDDKDCTIKISTNDDSIKNLTVQLSPSNPQHIIQPFLDNSKMDYHFIFSYLQFTSSLFKALKVILNERGGKFHESGSQYSTMVNIGLHNLNEYQIVYYNPQAGTKITICIELKTVLHNGRDKIQFHIHFADVAHITTKSPAYPMMHQVRNQVFMLDTKRLGTPESVKPANASHAIRLGNGVACDPSEIEPILMEIHNILKVDSNSSSS

SEQ ID NO: 282 - protein, 597 aa, Saccharomyces cerevisiae; identical to SEQ ID NO: 240

SEQ ID NO: 283 - protein, 1341 aa, Saccharomyces cerevisiae
MSLSPHVENASIPKGSTPIPKNRNVSSIGKGEFLGSSSSNNSSFRMNHYSNSGQPSVLDSIRRPNLTPTFSYSNGVYMPESHRTSSFNDSYLPYDKNPYAKTTGSMSNKSNMKIKTKKNAINTNTRKSSGLIYTTKVDKELSSIDKVNDPNINGLVCAGKTHLGLYKFSPSDRSIKCVHDFITPNSNTSTRGTTSLLPKLSKRTRQNKFSTIADVKTGFNNYKNCIAVCNNSTAISIYDLNKSSSIDNPLITSLCEHTRSINSFDFNMVESNLIISGGQDSCVKIWDLRSNKSKSSNRSDISINTASDSIRDVKWMPGYNFASKNDQGSSTYGNLKSGYKFASIHDSGYLLKFDLRQPAQYEKKLNAHTGPGLCLNWHPNQEYIATGGRDGKCCLWFVGDNANAAENTVLNYGNSPSLHAPNTSLNNSGSLAFPKLTINTGYPVTKLKFKPAYSSNIYNSLLGISSMGDEAEVRIYSLARKYIPKHVLLSETPSLGLVWWDENLIFNIDKGTRINGWDINKEPTVLENLSKNTTTWRDLDGNGLLSVDQEIGSYEVVEPELQPTSSTTCKKHPGTIKNPKNGNPENQGIIGGIKKGFSHTGLTSFTPERPPTLKAGPTFSTKSLTLASGASSFNSSSASLTSLTPQTENREEIAIEPPCIITLDIPQIFNNIRLTKIAHSRKKNVISESSSMKNSPVEKFKYLARQLKFSYIREHNVSDSADTAYKNDIENIDVVKNATETHGDNTTTTNNNDDGDDDDDDDDDDKIIESHLLKKYNFPENNTWATLMNEKVNNKKSKRNSSSSREFDEKDVRSSISSISASRQSHDRARKIDKNVEAELQEKIQTLVDLISIATHNASVYLSIDDLTNFKIWILIRDSLLWDLKWMTSSQISSDNASNMDANESSDFEAGENLKTGKEFPEEDGAGTSGAESLVEERPQAFRANSDEPSDAEKKPVSKLKEQLKNTEIIPYAQPNEDSDEVLTKLKELQNQRLESRTKMGETVSDDVIIEEDEHEHQEEEQPHDSPTKSAQFHASPIAKSIPILQKREHRKSFIDTFMLHSPNGYNGDTDIGNEDDNISPRFTYNSVSPRSKVSSLQSYATTTSQLETFKKLSSHTAPIIGSPRHAPSRPDSIGREQLSSSLTKKLAKCKKIIADPPWDTKKLIKQLYNQATETGNVVLTVNILFLFQTIYQITEIDIAKDAIAHFLLLLHRYELFGIAADVLKYCPFEDIMGSEGDQSSIRLFCERCGELITNESSKEKLRAEAQQTGNKKIMDKFGYWYCDSCKKKNTSCVLCERPLKKLTMVILPCGHEGHFQCIQEWFLDENEQECPGGCPGVAFI

SEQ ID NO: 284 - protein, 510 aa, Saccharomyces cerevisiae
MHVFFPLLFRPSPVLFIACAYIYIDIYIHCTRCTVVNITMSTNRVPNLDPDLNLNKEIWDLYSSAQKILPDSNRILNLSWRLHNRTSFHRINRIMQHSNSIMDFSASPFASGVNAAGPGNNDLDDTDTDNQQFFLSDMNLNGSSVFENVFDDDDDDDDVETHSIVHSDLLNDMDSASQRASHNASGFPNFLDTSCSSSFDDHFIFTNNLPFLNNNSINNNHSHNSSHNNNSPSIANNTNANTNTNTSASTNTNSPLLRRNPSPSIVKPGSRRNSSVRKKKPALKKIKSSTSVQSSATPPSNTSSNPDIKCSNCTTSTTPLWRKDPKGLPLCNACGLFLKLHGVTRPLSLKTDIIKKRQRSSTKINNNITPPPSSSLNPGAAGKKKNYTASVAASKRKNSLNIVAPLKSQDIPIPKIASPSIPQYLRSNTRHHLSSSVPIEAETFSSFRPDMNMTMNMNLHNASTSSFNNEAFWKPLDSAIDHHSGDTNPNSNMNTTPNGNLSLDWLNLNL

SEQ ID NO: 285 - protein, 306 aa, Saccharomyces cerevisiae
MNYNCEIQNRNSKNVDNQVSLPPIQVLFNSIEKRSMPELAFSNIEYSHGNLRSSTEEQNYPAPVLLPQHHSIAYPAINSGGTSTTATPTASTVETSKTSSSAMDTQSQYGSSKKSKSASDDAKPCYKSAPIYEIINKEKDAGAQYNRPFSDFVESKSRRKQNSGRRSNLPKETVQILNTWLLNHLNNPYPTQQEKRELLIKTGLTKIQLSNWFINVRRRKIFSDYYTLVNSIPNDNANNTPVERVQNVSAYHNTLSATNNTMYDATSTCSTDYELSKRFAHAPVTRRKKLIDRLEELKKLSNPDMN

SEQ ID NO: 286 - protein, 615 aa, Saccharomyces cerevisiae
MLSYFQGFVPIHTIFYSVFHPTEGSKIKYEFPPNNLKNHGINFNTFKNYIIPKPILCHKLITFKYGTYRIVCYPVTINSPIYARNFFSFNFVFVFPYDCETSPYEPAITRLGKMFKVLEEQNQLLSKSERDPVFFDLKVLENSTTTPSTAGPSSTPNPSSNTTPTHPTSEKDTKDMRSSRYSDLIKDLGLPQSAFSIQDLLMRIFQDLNNYSECLIPIDEGNAVDIKIFPLLRPPTTCVSLEDVPLSSVNLKKIIDVNWDPTMMSIVPYIDGLNSIAKISKLSNSDPGLVIECIRHLIYYKCVTLSDIFQFSNIYAPSSLIRNFLTDPLMASDCQSYVTFPEVSKISNLPLNKSLGSGDQDSPSFSVRRKSKSSSIPSNPDSRTTSFSSTSRVSQNSSLNSSFSSIYKDWRQSQTSCSSSNIHVINNRNRFLPTRSCLFDLYRSLSQGQTLKTWYESKYMILKENNIDIRRFITFGLEKRIIYRCYSFPVMINAGSREPKEMTPIITKDLVNNDKLLEKRNHNHLLSATGSRNTAQSGNLKPERPSKVSFEMQRVSSLATGKSTMPKLSDEEEGILEESIRNAETFDKICVLLSKPKLEVESYLNELGEFKVINS

SEQ ID NO: 287 - protein, 970 aa, Saccharomyces cerevisiae
MDPHQSPADNAASPTKSVKATTKNSSTNNNVNSNNSNNNSNHDILNFNDNYTTILQHLANDHPNILREKGGSQQQQHQQQQQQQQQQQQQQQQQSLDTLLHHYQSLLSKSDNAIAFDDNVSNSADHNGSNSNNNNNNNDISSPGNLMGSCNQCRLKKTKCNYFPDLGNCLECETSRTKCTFSIAPNYLKRTSSGANNNMPTSSNSKRMKNFEDYSNRLPSSMLYRHQQQQQQQQQQQRIQYPRSSFFVGPASVFDLNLTKHVRLDNVDQIQLSKTLSLRKVSPTAQFILQDDFDTTLHSKQEYEVDLVENLVHPHGHLLVEIFFKLIHPFLPILHERVFLEKYSRSYRELTAPLLASIYSLALQYWDFHPALLGFPKPDVTAQLNNIALETFYARVGRPKLSIIQTGLLILQCRSECHNNWVLCSSVVALAEELGLGVECNDWKLPKWEKDLRKRLAWAVWLMDKWCALNEGRQSHLILGRNWMIKLLNFDDFPLNSPTILNSLQNDQSGSSPSSSNDVKNHQIAFGNLPIFNINPTLEDFKNGTLMFQQMVSLSIILGEIMDTFYTQGSMTINKSIEQVLKLAKPLQLKLREWYHSLPKNLSMSYATPQKLNSNSTLTLAYFATEITLHRKIICALNPQTPKELVQVCRTAARTRLVAAIEFIRDLKNEHINAFWYNCSTGNLMLIGTFAALLYVTSATKEEAMIFRDYVRNYTWVLKIGSKYFDKLSNALNNMHLLFAQIPGLLTDEPVVVSPNSNINSVNPQRSGVQSQIPIQFNVGSPAMTEQGSPLNQWKNLPQEILQQLNSFPNGTTSTTTPVNPTSRQTQLESQGSPAINSANNNSNNTPLPFAPNKSSKKTSQSSPNVTPSHMSRHPPSNTSSPRVNSSTNVNSNTQMNASPLTSINETRQESGDAADEKTAGRERTANEESSTELKDDNPNSNQETSATGNQTIKMNDDKNVTINTRETPL

SEQ ID NO: 288 - protein, 255 aa, Saccharomyces cerevisiae
MDESVDPVELLLRLLIRHKPHLKPYAYRQDSWQRVLDEYNRQTGSRYRQSRTLKTKFRRLKDLFSADRAQFSPSQLKLMGALLDEAPEHPRPRTKFGNESSSSLSSSSFIKSHPGPDPFQQLSSAEHPNNHSSDDEHSGSQPLPLDSITIGIPPTLHTIPMILSKDNDVGKVIKSPKINKGTNRFSETVLPPQMAAEQSWSDSNMELEICLDYLHNELEVIKKRQEDFECKVLNKLNIIEALLSQMRPPSQGDKI

SEQ ID NO: 289 - protein, 1950 aa, Saccharomyces cerevisiae
MSVADDDLGSLQGHIRRTLRSIHNLPYFRYTRGPTERADMSRALKEFIYRYLYFVISNSGENLPTLFNAHPKQKLSNPELTVFPDSLEDAVDIDKITSQQTIPFYKIDESRIGDVHKHTGRNCGRKFKIGEPLYRCHECGCDDTCVLCIHCFNPKDHVNHHVCTDICTEFTSGICDCGDEEAWNSPLHCKAEEQENDISEDPATNADIKEEDVWNDSVNIALVELVLAEVFDYFIDVFNQNIEPLPTIQKDITIKLREMTQQGKMYERAQFLNDLKYENDYMFDGTTTAKTSPSNSPEASPSLAKIDPENYTVIIYNDEYHNYSQATTALRQGVPDNVHIDLLTSRIDGEGRAMLKCSQDLSSVLGGFFAVQTNGLSATLTSWSEYLHQETCKYIILWITHCLNIPNSSFQTTFRNMMGKTLCSEYLNATECRDMTPVVEKYFSNKFDKNDPYRYIDLSILADGNQIPLGHHKILPESSTHSLSPLINDVETPTSRTYSNTRLQHILYFDNRYWKRLRKDIQNVIIPTLASSNLYKPIFCQQVVEIFNHITRSVAYMDREPQLTAIRECVVQLFTCPTNAKNIFENQSFLDIVWSIIDIFKEFCKVEGGVLIWQRVQKSNLTKSYSISFKQGLYTVETLLSKVHDPNIPLRPKEIISLLTLCKLFNGAWKIKRKEGEHVLHEDQNFISYLEYTTSIYSIIQTAEKVSEKSKDSIDSKLFLNAIRIISSFLGNRSLTYKLIYDSHEVIKFSVSHERVAFMNPLQTMLSFLIEKVSLKDAYEALEDCSDFLKISDFSLRSVVLCSQIDVGFWVRNGMSVLHQASYYKNNPELGSYSRDIHLNQLAILWERDDIPRIIYNILDRWELLDWFTGEVDYQHTVYEDKISFIIQQFIAFIYQILTERQYFKTFSSLKDRRMDQIKNSIIYNLYMKPLSYSKLLRSVPDYLTEDTTEFDEALEEVSVFVEPKGLADNGVFKLKASLYAKVDPLKLLNLENEFESSATIIKSHLAKDKDEIAKVVLIPQVSIKQLDKDALNLGAFTRNTVFAKVVYKLLQVCLDMEDSTFLNELLHLVHGIFRDDELINGKDSIPEAYLSKPICNLLLSIANAKSDVFSESIVRKADYLLEKMIMKKPNELFESLIASFGNQYVNDYKDKKLRQGVNLQETEKERKRRLAKKHQARLLAKFNNQQTKFMKEHESEFDEQDNDVDMVGEKVYESEDFTCALCQDSSSTDFFVIPAYHDHSPIFRPGNIFNPNEFMPMWDGFYNDDEKQAYIDDDVLEALKENGSCGSRKVFVSCNHHIHHNCFKRYVQKKRFSSNAFICPLCQTFSNCTLPLCQTSKANTGLSLDMFLESELSLDTLSRLFKPFTEENYRTINSIFSLMISQCQGFDKAVRKRANFSHKDVSLILSVHWANTISMLEIASRLEKPYSISFFRSREQKYKTLKNILVCIMLFTFVIGKPSMEFEPYPQQPDTVWNQNQLFQYIVRSALFSPVSLRQTVTEALTTFSRQFLRDFLQGLSDAEQVTKLYAKASKIGDVLKVSEQMLFALRTISDVRMEGLDSESIIYDLAYTFLLKSLLPTIRRCLVFIKVLHELVKDSENETLVINGHEVEEELEFEDTAEFVNKALKMITEKESLVDLLTTQESIVSHPYLENIPYEYCGIIKLIDLSKYLNTYVTQSKEIKLREERSQHMKNADNRLDFKICLTCGVKVHLRADRHEMTKHLNKNCFKPFGAFLMPNSSEVCLHLTQPPSNIFISAPYLNSHGEVGRNAMRRGDLTTLNLKRYEHLNRLWINNEIPGYISRVMGDEFRVTILSNGFLFAFNREPRPRRIPPTDEDDEDMEEGEDGFFTEGNDEMDVDDETGQAANLFGVGAEGIAGGGVRDFFQFFENFRNTLQPQGNGDDDAPQNPPPILQFLGPQFDGATIIRNTNPRNLDEDDSDDNDDSDEREIW

SEQ ID NO: 290 - protein, 678 aa, Saccharomyces cerevisiae
MHSHRQKWGRQTDIARVLDDIEHDLYLPQRLSLDGATGTDESHVQYGIVKDCSVLTCGCCISESLFNDLCRETSNKQTACPICQRENVRLLSAIKPLRDLARQIDFFRSTTGQGESESDELPAIVKTSPSSSSLSLTPSRSSSTAGLEADNKTLSDPTVKEKSSLLELFHIVASKMHNANTEVGSDHPLTTGTTRDQEEHTTKENYSSSLLEPNYDDHANWKILDNASNTRTVPIDNNFSLMSTDVTIPSTANYQTNSAHDLDEEKEYFFANCFPMYRKKFQFNTHPKFLGTKSKLFINQSISPDCTKFALITEHKWEIYSINPKDNSPQLVSCGKSSGEYGPNFNQLTEQSSSSLSTTSQASKKKKKNWSQRFCKLSNDFLIISGSQNILNVHDIHQNGKLIYTYVSRFPIRCIDIDPRSQIIAYGITGKDRHTGAEQALVVIQQITRNKVTLEPEFPPPITITLPYRDPINTIQLSHDAKYLTCSTALESRFLIISLQKINEPRLIMKSVRSIDTSLESEGITDTKLFPGNPNLMCITSTAFNSSPLVINTKITQINGVRTVAQPSMLIRVDEIGCKIHKCEISPRNDAIAFLDRNGSVYIMCAPTMMDNNEKRRTILVETVANAYRAYESATLRFNPEGNKLYILDRKGTFFVEDFAYGLPQSREITKCKQIFHK

SEQ ID NO: 291 - protein, 413 aa, Pyrococcus furiosus
AELEGLDESAAQVMATYVWNLGYDGSGITIGIIDTGIDASHPDLQGKVIGWVDFVNGRSYPYDDHGHGTHVASIAAGTGAASNGKYKGMAPGAKLAGIKVLGADGSGSISTIIKGVEWAVDNKDKYGIKVINLSLGSSQSSDGTDALSQAVNAAWDAGLVVVVAAGNSGPNKYTIGSPAAASKVITVGAVDKYDVITSFSSRGPTADGRLKPEVVAPGNWIIAARASGTSMGQPINDYYTAAPGTSMATPHVAGIAALLLQAHPSWTPDKVKTALIETADIVKPDEIADIAYGAGRVNAYKAINYDNYAKLVFTGYVANKGSQTHQFVISGASFVTATLYWDNANSDLDLYLYDPNGNQVDYSYTAYYDFEKVGYYNPTDGTWTIKVVSYSGSANYQVDVVSDGSLSQPGSSP

SEQ ID NO: 292 - protein, 177 aa, Thermoascus aurantiacus
TRISSCSGSRQSALTTALRNAASLANAAADAAQSGSASKFSEYFKTTSSSTRQTVAARLRAVAREASSSSSGATTYYCDDPYGYCSSNVLAYTLPSYNIIANCDIFYTYLPALTSTCHAQDQATTALHEFTHAPGVYSPGTDDLAYGYQAAMGLSSSQAVMNADTYALYANAIYLGC

SEQ ID NO: 293 - protein, 325 aa, Palaeococcus ferrophilus
GKPKPSQPPQEVPWGIERVKAPSVWSTTDGSSNGVIQVAILDTGIDYDHPDLAANLAWGVSTLRGRVSTKPKDYRDQNGHGTHVAGTIAALNNDIGVVGVAPGVQIYAIRVLDASGRGSYSDIAIGIEQAILGPDGVADKDGDGIIAGDPDDDAAEVISMSLGGSADDSYLHDMIIQAYNAGIVIVAASGNEGASSPSYPAAYPEVIAVGASDINDNIASFSNRQPEVSAPGVDVLSTYPDDTYKTLSGTSMATPHVSGVVALIQAAHFNKYGTILPVGTFDDMSKNTVRGILHITADDLGSPGWDVDYGYGIVRADLAVQAALG

SEQ ID NO: 294 - protein, 424 aa, Thermococcus litoralis
MEFNKVFSLLLVFVVLGATAGIVGAVSAEKVRVIITIDKDFNENSVFALGGNVVARGKVFPIVIAELSPRAVERLKNAKGVVRVEYDAEVQVLKGKSPGAGKPKPSQPAQTIPWGIERIKAPDVWSITDGSSSGVIEVAILDTGIDYDHPDLAANLAWGVSVLRGKVSTKPKDYKDQNGHGTHVAGTVAALNNDIGVVGVAPAVEIYAVRVLDASGRGSYSDIILGIEQALLGPDGVLDSDGDGIIVGDPDDDAAEVISMSLGGLSDVQAFHDAIIEAYNYGVVIVAASGNEGASSPSYPAAYPEVIAVGATDVNDQVPWWSNRGVEVSAPGVDVLSTYPDDSYETLSGTSMATPHVSGVVALIQAAYYNKYGSVLPVGTFDDNTMSTVRGILHITADDLGSSGWDADYGYGIVRADLAVQAVN

SEQ ID NO: 295 - protein, 422 aa, Thermococcus thioreducens
MGRKDITIALVALIVLSLLGVPATAEKPELVRVIVHVDRGHFNTADVATIGGHVVYQFKLIDAVVVEVPSTAVGRLKKLPGVKMVEFDHKARILAGPPSWLGGGQPSQQIPWGISRVRAPDVWGITDGSGGVIEVAVLDTGVDYDHPDLAGNIAWCVSTLRGRVTTNPAQCKDQNGHGTHVIGTIAALNNDIGVVGVAPGVEIYSIRVLDASGSGSYSDIAIGIEQALLGPDGILDKDGDGIIVGDPDDDAAEVISMSLGGPTDDQYLHDMIITAYNYGVVIVAASGNEGASSPSYPAAYPEVIAVGASDVNDQIASWSNRQPEVSAPGVDILSTYPDDTYETLSGTSMATPHVSGVVALIQAAYYNKYGKVLPVGTFDDMGTNTVRGILHVTADDLGDAGWDIYYGYGIVRADLAVQAAIG

SEQ ID NO: 296 - DNA, 16 bp, Artificial Sequence
  Synthesized
attcccagctcgcccc

SEQ ID NO: 297 - DNA, 16 bp, Artificial Sequence
  Synthesized
gttttagagctagaaa

SEQ ID NO: 298 - DNA, 20 bp, Artificial Sequence
  Synthesized
atgtagaaaaaggagaacaa

SEQ ID NO: 299 - DNA, 20 bp, Artificial Sequence
  Synthesized
agaaagaaaaaggatctcaa

SEQ ID NO: 300 - DNA, 20 bp, Artificial Sequence
  Synthesized
ggagaattgggcaagtatgt

SEQ ID NO: 301 - DNA, 20 bp, Artificial Sequence
  Synthesized
gatgagaaggtatccacaaa

SEQ ID NO: 302 - DNA, 20 bp, Artificial Sequence
  Synthesized
acactccgagcaaccatagc

SEQ ID NO: 303 - DNA, 20 bp, Artificial Sequence
  Synthesized
tccgttgctgatgatgattt

SEQ ID NO: 304 - DNA, 20 bp, Artificial Sequence
  Synthesized
gtcttctcctcttcgatgac

SEQ ID NO: 305 - DNA, 20 bp, Artificial Sequence
  Synthesized
tggtgtcacttcgatttctt

SEQ ID NO: 306 - DNA, 90 bp, Artificial Sequence
  Synthesized
acaacaaaacaaggataatcaaatagtgtaaaaaaaaaattcaagaatagtggtgagatacactgacattattgttatcagagaagaata

SEQ ID NO: 307 - DNA, 90 bp, Artificial Sequence
  Synthesized
cagtctattccatttgactgaagaaaaaaaaatttattactgaagaatagtcgccacaaagaggatgcaaaccaatggtgcgaaacactg

SEQ ID NO: 308 - DNA, 90 bp, Artificial Sequence
  Synthesized
tacgacgttccattcgactgaaaaaaaaaatatttatcgctgaagggcagttgccatcacaggacgacggaaatcccatggtgagggact

SEQ ID NO: 309 - DNA, 90 bp, Artificial Sequence
  Synthesized
tgtggcagaaaataaccgcaacaattatataacgtcacagaacactcatgaaaacataataataaacctgcagaggttcatatcaagttt

SEQ ID NO: 310 - DNA, 90 bp, Artificial Sequence
  Synthesized
gtagggtttgttatacgcaatattgctgttgaattattagaaattctagaacttttcttagaacgctaccatttctttattttttttgca

SEQ ID NO: 311 - DNA, 90 bp, Artificial Sequence
  Synthesized
ttattttttttttcttttgaattagatcactaataaactcttatatgcgtttaattaacttactgtctttttttttttttttttaaccat

SEQ ID NO: 312 - DNA, 90 bp, Artificial Sequence
  Synthesized
tccctaatctttacaggtcacacaaattacatagaacattccaatattcaagccctctactatgttttatagttgacatatttgtatata

SEQ ID NO: 313 - DNA, 90 bp, Artificial Sequence
  Synthesized
gactaaccgttaaagattctaaatcggtactgtaaatactttgaaggtatataatattttactaataaagaatttacaaagtttacaaat

SEQ ID NO: 314 - DNA, 90 bp, Artificial Sequence
  Synthesized
tattcttctctgataacaataatgtcagtgtatctcaccactattcttgaattttttttttacactatttgattatccttgttttgttgt

SEQ ID NO: 315 - DNA, 90 bp, Artificial Sequence
  Synthesized
cagtgtttcgcaccattggtttgcatcctctttgtggcgactattcttcagtaataaatttttttttcttcagtcaaatggaatagactg

SEQ ID NO: 316 - DNA, 90 bp, Artificial Sequence
  Synthesized
agtccctcaccatgggatttccgtcgtcctgtgatggcaactgcccttcagcgataaatattttttttttcagtcgaatggaacgtcgta

SEQ ID NO: 317 - DNA, 90 bp, Artificial Sequence
  Synthesized
aaacttgatatgaacctctgcaggtttattattatgttttcatgagtgttctgtgacgttatataattgttgcggttattttctgccaca

SEQ ID NO: 318 - DNA, 90 bp, Artificial Sequence
  Synthesized
tgcaaaaaaaataaagaaatggtagcgttctaagaaaagttctagaatttctaataattcaacagcaatattgcgtataacaaaccctac

SEQ ID NO: 319 - DNA, 90 bp, Artificial Sequence
  Synthesized
atggttaaaaaaaaaaaaaaaaagacagtaagttaattaaacgcatataagagtttattagtgatctaattcaaaagaaaaaaaaaataa

SEQ ID NO: 320 - DNA, 90 bp, Artificial Sequence
  Synthesized
tatatacaaatatgtcaactataaaacatagtagagggcttgaatattggaatgttctatgtaatttgtgtgacctgtaaagattaggga

SEQ ID NO: 321 - DNA, 90 bp, Artificial Sequence
  Synthesized
atttgtaaactttgtaaattctttattagtaaaatattatataccttcaaagtatttacagtaccgatttagaatctttaacggttagtc

1-25. (canceled)

26. A recombinant Saccharomyces cerevisiae yeast cell comprising:
(1) a heterologous polynucleotide encoding a transporter, and
(2) a heterologous polynucleotide encoding a glucoamylase, alpha-amylase, or protease;
wherein the transporter has at least 60% sequence identity to the amino acid sequence of SEQ ID NO: 163 or SEQ ID NO: 164.

27. The yeast cell of claim 26, wherein the heterologous polynucleotide of (2) encodes a glucoamylase.

28. The yeast cell of claim 26, wherein the heterologous polynucleotide of (2) encodes an alpha amylase.

29. The yeast cell of claim 26, wherein the heterologous polynucleotide encoding the transporter comprises the amino acid sequence of SEQ ID NO: 163 or SEQ ID NO: 164.

30. The yeast cell of claim 26, wherein the heterologous polynucleotide encoding the transporter is introduced into the cell using recombinant techniques.

31. The yeast cell of claim 26, wherein the heterologous polynucleotide encoding the transporter is operably linked to a promoter that is foreign to the polynucleotide.

32. The yeast cell of claim 26, wherein the heterologous polynucleotide encoding the glucoamylase, alpha-amylase, or protease is operably linked to a promoter that is foreign to the polynucleotide.

33. The yeast cell of claim 26, wherein the heterologous polynucleotide encoding the transporter is introduced into the cell using non-recombinant breeding techniques.

34. The yeast cell of claim 26, wherein the cell is capable of maintaining the same yield of a fermentation product with less supplemental nitrogen (e.g., urea, ammonia, ammonium hydroxide) during fermentation, when compared to an otherwise identical fermenting organism lacking the heterologous polynucleotide encoding the transporter.

35. The yeast cell of claim 26, wherein the cell is capable of decreasing residual tripeptides or tetrapeptides following fermentation, when compared to an otherwise identical yeast lacking the heterologous polynucleotide encoding the transporter.

36. The yeast cell of claim 26, wherein the cell comprises multiple copies of the heterologous polynucleotide encoding the transporter.

37. A composition comprising the yeast strain of claim 26, and one or more components selected from the group consisting of: surfactants, emulsifiers, gums, swelling agents and antioxidants.

38. A method of producing a derivative of a yeast strain of claim 26, the method comprising:
(a) providing:
(i) a first yeast strain; and
(ii) a second yeast strain, wherein the second yeast strain is yeast cell of claim 26;
(b) culturing the first yeast strain and the second yeast strain under conditions which permit combining of DNA between the first and second yeast strains;
(c) screening or selecting for a derivative yeast strain comprising the heterologous polynucleotide encoding the transporter of claim 26.

39. A method of producing ethanol, comprising incubating a yeast cell of claim 26 with a substrate comprising a fermentable sugar under conditions which permit fermentation of the fermentable sugar to produce ethanol.

40. A method of producing a fermentation product from a starch-containing or cellulosic-containing material comprising:
(a) saccharifying the starch-containing or cellulosic-containing material; and
(b) fermenting the saccharified material of step (a) with the yeast cell of claim 26.

41. The method of claim 40, comprising liquefying the starch-containing material at a temperature above the initial gelatinization temperature in the presence of an alpha-amylase prior to saccharification.

42. The method of claim 40, comprising adding a protease in liquefaction.

43. The method of claim 40, wherein fermentation and saccharification are performed simultaneously in a simultaneous saccharification and fermentation (SSF).

44. The method of claim 40, comprising recovering the fermentation product from the fermentation.

45. The method of claim 40, wherein the fermentation product is ethanol.
